United States Patent Application Publication US 2007/0161031 A1 - sequence listing, part 35

SEQ ID NO: 44499 - DNA, 2300 bp, Homo sapien
atttttcctgggtcatgccaccaattatgcctaaagagaagaacagaagagaaaatgttggctagctctaactactctactaaaatggaaagaaagtaattccaaggtaagtccaccccagagagcaaatgggcctttttaaaatgctgaggggagggaatagcaatttcttagtgcctttgacaacattccccagtggcctggtggcatggaaatttgcctagcttcatttgtggaggtcatgccaccctggataaaaggaaggcagtttaccaggctaaactttgtttataaggtttctttcccctccagtgtgggaaagagagaataataaagtctcatttgcaattttcactggccagaaattaaaagcaggagacaatgttgaagctatagtatcccaaaaaatagcaaattgacctatttatgccttaaatttaagacaaaacaattatttcagcagttcaataagattgagccagtttttgtgttattagcaaaaccccgaatgtcccacagatgtggctcgcaatggtggacagaggtaagagagctggtgttgacccaagctatgtttaatataaagactcctttgttgactcactgtgataacagttcctcatttgttagagcattgggtataaagttatgtaactcacccatgcccttctctctagctgactgtgatagccaacactgcctactttttgctgtggtagatcttgggactgccaaagccacttcctgtatgtcagacacatttgacttttacagcagttcaggcaattcggcaaatttgaaggaaggtgggaagaggtggttaggaattagagtcttttcccccttttctcaaataactagcaactcctactctcttgacttatgctatgtttctacccagtataacaaagtatcggacaccatccctgcgcattgtcccaatgactttcacgatacttgccaaaaccatcgggggttttctcaattatttgaagggcagtttgtacccagtcttgtcctcccagccattaccatcctactctattatcttgcacttaacaaacagattgatttcttgcctaaaattagctggagaattctatttggatcagtccatcagaattaaaaagtataattagcctgagaattcactccacttttcaacctaactgctgcttaaatatctcctgcaatgttttgcactttgtgcagagcatgtagaactctgtctctgggtgaagtagctgattacaggaaagcagccatgaattgctatgagcttgtcactgacgatcctgcatatgtgtgcgttatcaactacaattgtcttcgtaaaattaaataaaagcacgcatttattattgtggggctccaattaagggacagctggtgctcctattacacttgcattaaatcgaaacttgtaatttccctgtgcagatgcacactttttaatcaagatataaaattgcatttgctttgtccattttccaaagtatctggaaccttacctcagggttcctcttatcctgcaaactccgtggaagaaggggaacagattgcactgatcagcatttccctgtctgaaattcttagagggaaataaacgattggggcatttatgaaagataaaacccccaagaaggcagctggtgagtatgaatgtatttatttagcctgtagcgagtggacttattcatcgactaagatcaattttgaaaggacccatttcgcctcacctgtctgggaagtgtctatgagcgtcccgctgtgaaccacactgcctttctcactggcacttcagttcctgaagagccagaaactttgcacccctaccccaaccccgcctctggggatgtgtgcctgcttcgtttgttttcgcttttgtaaaatctgagcgttatgatttgtccccctttcccttcctaatgaaatgacaaagggtctgtgcagcgggggctgggctgctgggtttgggggcgaggcgccacaccccctgagaataaagcccgcgctgcgctctcggagaaccaggcacgagtgagcgaaccacacaaagaatatatttcgcgacgaaacagcgccctacaggaagaaagtgcccgcactccgagcgtgagccgcagcgcgactttttggcgctctttgggagcagtgagagagaggcggaggccagagagtccggggtgggcgcgggagccggggcggcccttggccgcattcccgcccgtcccgcagcggcgcgcggagccaggtgaggttggcggcggcgccgcgctacctggccgggcggggcgggg

SEQ ID NO: 44500 - DNA, 2300 bp, Homo sapien
actggagggagttgcacactcagtcacggaaacaccagtgtcctgatgtacagcaagcccctttgatcaatcagatggggacagactgactcctgagttcccagggtccttttcctgaaggaacatccattctttccctgttaaaccctgcattcctggtccagcagcagaaaagagcctttcggacactggagcttgaggaagatctgtgcctatttattagagaaggtggtgttagtatcaggaaataggtggatggtgctgggtttcttgggttcaaaccctggggctctgctgtgtgaccttgggcacatccctacccctctctgggcctcagtttcctcatgtgtcacattaccttggattagacggtctcactctgatggagtttttagttatgtatccattcattcaacaaaccttttatgagtcaagccctcctgcaggcacagggtttggtacacaggattcagcaagaagacagtctgtgctctaaaaaaggtcagattctcattctgtaatgctttttggtcctgctgtctttttatcatgctgacttaccttttcagaaaatgcccccgcttccgctggagaatggaaattggcaaagagagacggaaaagctccaatttgcgcctttgctattttaggagaggttgaaattacgagccaaagtggagtgatgcgctaagcggagtgacctccgtactccaagaaaagagaaaacccaggttctctgcttgtgaagtggctcgagctcttaggcgtgaggcattattatataaattcaagctcgctcgtgatccttagtaccctgagttgcctgaaggggggaatggcactgcctgcgtgtgcagtccgggagttcgagccgccgcggcaaccggagcgaggagcgcccgtccgcaccacctgtccccgccggcattccagagtagaggccgaattggcagcgagccggcccgggtcggtcgccgcctcagttcgcgcgggccctcctaggggtgtgtctcacggattccacacccggccgctcctggacaagccccgaaaggcgtcttcttccctggcgggagccgcgtgcgccccgcttttcgcgctgctgtcccgggggcgccgcaggcggatgcacgttctcaggcgacgctgggactgggctccctctgccgggccctgctcactcggggcctggccgccctgggccactcgctgaaccacgtgctccgtgcgatcttctccaaagaatttcggccccatggccaggtacgttctaggtgaaaaccgggtcgcgcctccaggcaggcgcaaggtgctgttacggggagggaaggcacccgcggggtagagaagggcgtaagtttcagctgccattggtggcccgggctagggtttccggaagggtgcggcgcaatttgccaacgccgcggatccgttgtaaatgttccgcggcaaccggcagggcaggttctccgatagcaagttgggtgccgccggctatatccccagggtaatatgagccccgggttccgagcttccttggaggccgcataccggatgaccaagcgggcgcgggcgccggcaaaaggagggtttcggggcatgcggggagaaacccggacagaggtgtgcgctccaaagaggataggggcagaagagcccggagagtccggcggacgaagcgggatggggatgggagcgggagccaccgagagtggagcgagacacgcgggggcccggactgggggcgtgagttgaggagtggggcgactgggcccggaggggtcccactggggctaaaccccgtggaggggctccggggagctccggagagctctggcggggggagggggcgaacggcccgcgggaaggagtcggggtgggggtgtgtgtgtgccgcagaagccacagcgctgagcctgccgggaaggaaggaagcggggaagggagccgccgccgcagccgccgccgccgtggagtactcggtgcggaggggagggggagaggggcgcagcagcggctccaggggaagggggcggtgcgggggcacgacgagcgcgggctgagctgcgggattgacgtaacgagcttgggtttcccccagcgtcgggaacatggatgagaaatccaacaagctgctgctagctttggtgatgctcttcctatttgccgtgatcgtcctccaatacgtgtgccccggcacagaatgccagctcctccgcctgcaggcgttcagctccccggtgccggacccgtaccgctcggaggatgagagctccgccaggttcgtgccccgctacaat

SEQ ID NO: 44501 - DNA, 2300 bp, Homo sapien
atgaggagagccacctattgggtaggctaaagaggttgactgcagtgagtggccaagcagaaggcaggggcagctggcaagcagagctccggggccacccccatagcttcccactaccctggctcacaccctaagctgccctcagggggagcaggcctaggactaccagcctgggcaccaggggagctcttggggaagctgagaggtcaaccttgtaagttactgcatctggcttcttcgcacaagttcattgggttttcagagtgttcctggaacctcaggacaggagatgctggagtgctagaaattcaggattcccaaaaaatccactatcccttatgtctgcactggacaaagggtccctcacggtccccagtaggtttgggggcacgtagaagtctagccagggctgggaattctagggggtggtaaagacagggtgcacagccacagaattgcctgagaacggcctgttccttatttggcctgtgacgcagttggcacattgagcttagagcaacaggtaaacacagcctcacatttggagtggcctaaaggtttctacatttcatccccacggtgactcagttggtcaaaacaggggacataattggtcctatcttacagacaagaaaactgaggctcaggaggggcaagtgattatcccagtgctgcccagggacagatttcccaggacttctggactattcttaggcttgccgcttcatggcatagatagaacaggaaacggatggagcagagctcagcaagggagatactgggagagcctgtctccaggagggacatgcccccaccccaggactcagctcgtggtctgcattctcccactcagtggccccagtgccaacagcactgctcagaaacactgctgccaaccggtgccccttctgtagcagtgggactggagggagttgcacactcagtcacggaaacaccagtgtcctgatgtacagcaagcccctttgatcaatcagatggggacagactgactcctgagttcccagggtccttttcctgaaggaacatccattctttccctgttaaaccctgcattcctggtccagcagcagaaaagagcctttcggacactggagcttgaggaagatctgtgcctatttattagagaaggtggtgttagtatcaggaaataggtggatggtgctgggtttcttgggttcaaaccctggggctctgctgtgtgaccttgggcacatccctacccctctctgggcctcagtttcctcatgtgtcacattaccttggattagacggtctcactctgatggagtttttagttatgtatccattcattcaacaaaccttttatgagtcaagccctcctgcaggcacagggtttggtacacaggattcagcaagaagacagtctgtgctctaaaaaaggtcagattctcattctgtaatgctttttggtcctgctgtctttttatcatgctgacttaccttttcagaaaatgcccccgcttccgctggagaatggaaattggcaaagagagacggaaaagctccaatttgcgcctttgctattttaggagaggttgaaattacgagccaaagtggagtgatgcgctaagcggagtgacctccgtactccaagaaaagagaaaacccaggttctctgcttgtgaagtggctcgagctcttaggcgtgaggcattattatataaattcaagctcgctcgtgatccttagtaccctgagttgcctgaaggggggaatggcactgcctgcgtgtgcagtccgggagttcgagccgccgcggcaaccggagcgaggagcgcccgtccgcaccacctgtccccgccggcattccagagtagaggccgaattggcagcgagccggcccgggtcggtcgccgcctcagttcgcgcgggccctcctaggggtgtgtctcacggattccacacccggccgctcctggacaagccccgaaaggcgtcttcttccctggcgggagccgcgtgcgccccgcttttcgcgctgctgtcccgggggcgccgcaggcggatgcacgttctcaggcgacgctgggactgggctccctctgccgggccctgctcactcggggcctggccgccctgggccactcgctgaaccacgtgctccgtgcgatcttctccaaagaatttcggccccatggccaggtacgttctaggtgaaaaccgggtcgcgcctccaggcaggcgcaaggtgctgttacggggagggaaggcacccgcggggtagagaagggcgtaagtttcagctgccattggtggcc

SEQ ID NO: 44502 - DNA, 2300 bp, Homo sapien
tgaaggtctgctttttcaagaactagactaagtgttctcagtagattattttagttaactcgcatgacagcccactgaggtagccatcattaacctcattttcatggatgagaaaattgaggttctgatgaactcacagagccctaattaaaccccacagggcagtgtgctctccaaacctatgctctcttctctttaaaagcactcatttgagattggattcctctttactatacccctaaaccagctttttggaggtacctggtcaggctactttcttcttcttcttttttttttttttctctttttttgagacagggtctcactctgtcacccaggctggagtgcagtagtatggtcatggctcactgcaccctcaatctctcaggctcaatggatcctccaacctcagcctcccgagtagcttggaaccacaggtacatgccacgacgcccagctaatttttggtattttttttttttttttttttttttgtagacacggggtttcactatgttgcccaggctggtctcaaacttctgtgctccagcgatccacctgccttggcctcccaaagtgttggaactacaagtgtgagccaccaaaccgagcccaggatattttctaagagtggaaactgaggcccaaagaagtgagatgactattccaggaacagtctggcctgctgcctatggttgctaggccttggcttattgtagctttaaaagccctgcatgagctgactcttccattcgttgtcagtgaaaagtgggaattttggctgggcacagtggcccatgcctgtaattccagcactttgggaggccgaggtgggtggatcacctgcggtcacaagttcgagaccagcctggccaacatggccaaaccccatctctactaaaaatacaaaaagtagccaggcatggtggtgcatgtctgtaatcccagctacttggaggttgaggcatgagaatcgcttgaacccaggaggtggaggctgcagtgagctgagaacataccactgcactccagccagggtgacagagtgagactccatctcaaaaaaaaaaagggaatttcactgctagtgaaatggtgggaacccttcatcagtagagggccggtcattgggctgcttgttcacagggttgggtctactatgagccccattccagtgcttatcctaccttctcagcacatattcatttagcatatacagcaccctggcacctccttttttttaactccttgagccccacgttttgttaggctagaaaaataaaactcagtgttctgtgggggaaactaaatgactattgagagtgatgcatataacacacccagcctgtttataatattaaagcctgaattgccggacagtgttttcattaagtactgctattcattccgtttggagagacacgtaagaacagaaaccagtcaactcagtagtttgcatgccttccatctttgtgacagaattgcctattattgagagtatgaacgttttcacaaaatgagagacagctagaaagccagggttgaagagaatgctcaggatgaggggaaggcataatctatgctttctggaaagaatgtcatgctttctttaatatgaagtttccactatttctgttctaatttgaacagggtaccctgctgtcacccttgtaatatgggcccagaacaactgcagctgctgctggcctggtgggatccagtgatgcaaatgccacagaatgcaggtagaaccaggtctaagtcattccccccgggctaaggccctgagtctttggcagtccttcagcctttgaggaagacagtaaaggtaaacatgtgacaaggaatgtcagatcagggaagtgcctcttgaatcacaaagtcaaccttgccatctcacagataaggaagttgagcccaaaagtgagcaagtggcttcctcagggtcatatatatatatatatagtctcattagtgtcagagtcaagacatgagcccaggtctctggactcccaggccagtgctcttgtaactacctcccactgttgtctcagattacaggaaccaaatgcatgtctggccttgtgctgcttcgcatgcaagccaggctgacctttatgctcccagaatcatcagccttttcattggaaaccatggaaggacggttctgggaaaataatgaaaatcataccacaccatagagacaaccagaagccctgctcagatgacagagttctcctcgccttccaggtactgaatcccaaatatatgcatacacagcaactccagttggtgttaga

SEQ ID NO: 44503 - DNA, 2300 bp, Homo sapien
atggagcagacatttctattagggtttttttttaactggacaaccagctgcttggcaccatagatcatgcctccaaatctgacagaagtggtacagttttgtgagtgtctggctatcctttgagtctgaagtgttgcactagtggttgatcaatcaaattgaatggattgaatttgtaggtaaaatgagagaaaagcctgttggctttcataacttttgaatgcagctgtcatctatacgttttgaatctggtgtgggggtgagaaaggaggaggaatgctgaagtttattttaggctgtatggaatagtcacatagtgctcttcaatggagtcttggagaaacaatacattttagtttaaaatactctcaaagcaagcaatcaaggcagaatgaagaacaggatttaagcttgagatgtcttagggatgtaggcagtggttagaccactcaacttgtacatcagcaagatggttcttaacctttactttccatgctcagtgggctcaaataagcctcctttcatctggaatgaaatgtagtcaggatggactgtgagaaaggaatgtctcttaactgtatttttgagggcagagagaagaaatatcaagagggtcttagattatttcatctaccaatagaaagaagataataatttttgataaatacagatgagctgggtgcaaaattttaaaataagctgcaagtggttctatggttgcaggttctctcaagttgttgaaataaaaaggaacaattaagactgccttttctgtggagagaaaattgtttaaatccttacttagcatctatagtaggacagtgaaatagaaataatccagagaacttaaatttgtgctgtgcttgaatgtttttatggccccatttctaccatgaaaaatataaccattctcttacttggatgcatatgcactttcgtatatggatggatgccatctctatttcgctgaacataggttgatagatgaaatactttataaaacaaaaatctcattaatttatgtttcaccaattttaagattttgataatttggacagggactgagcagaagtttccttcagtattattcataaagatggggtttgcttaagcaagttaatagcatagagaagattcaggaagaatatttaactactgaggaggaaacagcttccaactaattcttggatgtatactttctgatgcaaacatttgtagtgctgtctgctaacttattcagtaattcacattggctccagagttgttcagagattctgattttcaataattaagtacatctaattcttcctcactggttttgaatacagggagctagctccggttaagtgggccttatagccagagttgcctgcaggagcctcactagcctatatatctaatgggtaagaagttgttattcttaaacttttgttgaatgagcaagtacaatgtaatgatgttccccagtgccaagtgaaatataggaacatagctagatttggagggaggtagactggtttactttgagtggcccatatatgagatcctctagaaatcaaggaacaattcatctgttactgagttgagggccacatagtgccttcactttctcattcacttattgtagttgccccatggggtcattctgtgacaggaagattagcatattgtatgcatgcacttgagactctattgagtatactttcagttatgtactgaaagtcttccaagtgtttcatgatttcaattgaagttgggaaattaatcagaatggagtccagtattttggtggaaactacatgtagtgtatgagtgtagagtttgagttttgttgaagcaaagcatttctgtaatagtttaaagaatgtttcctgatttttgccatagtgtgcttgtcttgggaatcaagactctgccttcatgcagccatggaaggctctcaaaaggcattggtctcgttactgaagagctggatatctagaacctgaactagactctagtataaaaccaatactagaaataggatcattctgtgtagagaactaatgaactatttctttggtgttgtcttcacagctgaacttgcaaaacagattggaacttcaagattatcaataatcggagatacgtatattttatttgtaaagaaaacatggctgccctattcctacgtggttttgtccaaatagggaactgcaagactgggatatctaagtcaaaagaagcattcattgaagcagtggaaagaaagaagaaagatagactggtgctgtatttcaaaagtggaaaatatagcactt

SEQ ID NO: 44504 - DNA, 2300 bp, Homo sapien
ttttgcatgtgagaaaacataaatttggggcgaaccagaggggttaaaactctctccttaattaaactttagacaggctcttctaagccctctttttgacctcatccttgctaagtctagttttagcaggagtttagcttaagtcactttagtgagaatcccctgctcttgatatccaatcaccttcaatatctgatcacactcttcttccccacccttgatatctgatcaccccagcctacctttagcaagaatcttgttaagttggtttaacaagaattcatctacccttgatgtatcttcttagtaatttttcatccactgaccactttgctctgctccttggctataaatcctcttgcatttactgcatttagaattgagcccagaccaggtgcagtggctcacagccgggcgtggtggcgggagcctgtaatcccagctattcaggaggctgaggcaggagaatcacttgaacccaggaggcggagattgcggaggttgcagtgagcctagatcgtgccactgcactctaacctgggtgacagagtgagactctgccttaaaaaagaattgagcccagttctatcctgaggtctttttgccccattgccatagttcctgaataatatctgttttacctcttttattactgtccagctctggttctgttaggcaaatgctatagactgaattttgtccccctacccaataaaattcatatgttgaactcctaacccccaatttcactactctttcactactgtccagctctggttctgtttagcaaatgctatagactgaattttgtccccctacccactaaaactcatatgttgatgccctaacccccaatttgactgtatctggagatagggtctttaggaggtaattaaggttaaatgaggtcataagggtgggtcccaaataggataggatgtgtccttgtcaaaagagatctctccaagccctgctgccatgtgaggacacagtgagaaggcagacatctgaaagccaggaagtgagccctcaccagaaaccaaccctgctggaaacttgatcttggacttctagcctccagaactgtgagaaaataaatgtctattgtttcagccacccagtctatggtgttttgttacggcagcccgaggtgagtgagacagcacctctgtgtatctgaggctgaggtgtatgcttgtgtgcaatcacatgcattatttccagagtcgaggtgctagaggaagttggtgtggactagagaagcaggcctgaagacacagagcctgtgtggcatggttattaggacttttggtgagtaaggcagagttgagaccaacggtgggagaaagagactgccacaggcctctgcttctgctgggctttgtcttgttctctctttagatttctttctcattggcaatgtgtgtagcttccaaagtgaggtgtaggctgtggacttagtctattgattgtaccacagcccaacaaataaatgatactgtatattgttaactcctttttcccatctctatctactcaggaaggcttagtgtagctgtttgggtagagagacaaaaactggattcttccacaataagcttcttgaccagcaggtgaagaaataatccttgcaagagcccagatccagcttcttgtgagacaatggctgagaagaaatgatagacgggcctgcagaggcctacacgtctgattttcatcagtccctttaggatgtgctatggtttaaatgtgtcctccaaaagttcatgtgttggaaacttaattaccattgtaacagtattaagaggtagggccagaggaggaaaggctgaaggcgtgaaaaggcacgcaggcgcactgcacggaccgcccccctgctgctgcgcacctcacgtggcgcatgttacgccaggtaccacacgccacgtactgcacaccacgtaccacacgccacgtaccacacaccacgtaccacacgccacacacattatgccacgcacgttacgccacgcacgttacgccacgcacgttacgccacgcacgttacgccacgcacgttacgccacgcacgttacgccacgcacgttacgccacgcacctcacggcagccctacactcggcctggaagaattgtttttcttctctggaaaggtgaacatttatagcatttatttcccaaatctgttaacatggcaaaatatgtcagtctcactgaagctaacgaagaactcaaggtcttaatggacgagaaccagaccagccgccccgtggccgttcacacctccaccgtgaacccgctc

SEQ ID NO: 44505 - DNA, 2300 bp, Homo sapien
gttgttcaccctgtttgtatttaaatgaaaggaggctttgaagtgggagccgcctctgagcacggcttggggttcctgcctcccttggtaaagttcagacttgtccagatctgtttgtagccagaggttactgtttctggtggaaaaggctcaagtttgggttaataatacattatgaggaagagcaggagtaaacctggggagggcgggggcggcgggggggagcggcggcaacgaatgagttcctcccagccttggtgtgagaagtagctttctgatttggccttcatggttcaggagtatcattttctctcttacggtcactggcttccattttataataatgctcgttgcatctcagagcatattctccttggtgaagaacatctttaagtaaatgtatcaatcaatgaaaattaaaagtgctcagctaagccctagcaatgccttcaggacttgatggttaccagtttaaggaaagtcttgaaaatggcaggaaattcaattgtagttgagtttgcacattaaaaaaattgctctcctagtttcagagttaaatattcagccagcccacagaaattggaagtcacagttatagacgggtcacagtctgttcatgttgatagtctgttaacaaaatgtagaagagtctgcaagcaggtattcaaaataacagctcctcatagccagccatgtcaacgtggtttacaaacaacagtggagaaagtctcaacaaaccctctgagggtgataactgtaatgatggttcgtatctttgccctatgtaattttatgggaattgagagtctagccaaataataagttccagccctttttatctgcccagttcccagcacactcccgaggtgtctgaggcacttctcaacccaacctcttaaagcagattgtaacaataacaacggtaatgacaagttcccgagctgcacagttcccttcatttaaggagcgctgggagcttcaaaaaaacactcattaatggaatctgacaaagcttgcaagatgggaagtctctcccatttccagttttctggtggaaaagtggggactgagtcccagaggggtgtcagtctctctcaaggggcttgagggggtagggggtttgggagtcctgggctaccattattccatgaaattcgagagtcaagagtcccgggttctggacgcccccttccccggcgtgctatttaccaagtcgcttcccatttctgggccccagttcccttaatagaaggaagggttgggccaaatggtctccaagatctctgcggtcaaccctgtctttgccccctcacctcgcggttgggggtttctcccgcttcagagttcggttagacttgtagtagaaccgggtcgggggtgggagtggcgtcgaggggttggagtgttgcggatgcgggaaggaggatgcctgatggggtcctggacaaactggtgtttcacgagtaccgtcctatgggaagcaggtctggggagaccaggtgaggctctaggacgagctcggagccccaaatccccctgctgcctgcagcgaaacaatgcgagtaatgtgccttccccgcccagcccgggagctgcgcggataggagcgtccgcgggtgcgggatggcagcggggaggcggatatcgcggcgggagggctccgcgcggcttttgcccataggcggcgggtcaggtggccgcgcgcaagaaggcctggggctcagacatgggcttcgggacaagtcccaggccgtcccgttccccagaacctgggcccttcagcccggagtagttggccttccctttgtggttggggggcggtgggctggctccccgcctccgaggaggaggggaggaaggaggagccgggtggggcgtgtcacgcgaaggagcgccgggcgcccggtgcggccccctaggaagtggatttggccgctccggatccaacccggcttccaggttttctcccggcccggcccagcgtgctcccgcctgtctccggcccccccacgacgcccgccccctccccccgagtgccgcccgcttggccaagtttgcggagcgtcgccgcgcacgccggccagtcaatcagcggcagagctgagaagggcacagccgcgcggcggagggcagagtcagccgagccgagtccagccggacgagcggaccagcgcagggcagcccaagcagcgcgcagcgaacgcccgccgccgcccacaccctctgcggtccccgcggcgcctgccacccttccctccttccccgcgtccccgcctcgccggccagtcagcttgccgggt

SEQ ID NO: 44506 - DNA, 2300 bp, Homo sapien
cctgaaatcattacttgcacctcccaccttccaactgggccatgccaagccctctcccctcagtgtctttgtttacactgctttctttgcctcagcacccttctccccatctgcttgtctcacctaaactcctactggtctgagtttaggacatcatctcctctggcatgctttctccgatcccccccccccttcaccccttagaacttcatcttagcattcacacagtgggttaacttggttgttttccccattagtttgcagttctttgaggtcaggtaccacgggttggttaatctttgtatcctcattgtctgtttgtaatctacagtgcctggaacacagtaggagttcaaatatttgttaccgaatgaataaatggatgaatgaacttcccccgtgaccttcctctctctttgtctcccttctcagcccatgggtcctggaacacaacctcctctctccggaccttgcacaccccagacaatttcctggtgctgaggttctccctcaaaacctactttcacctaggtcggaaacaaaaccatcagatgacaaactaattcatgctgaggtgttaagtaatttcatcatacaaatacttattgagttctctactggactagggtgtggaggatcatgaaaataatccacgctaaagatccctacttagcagcatataggtaatgactaaatgcatttttccttggagagatatttcattctcaaagaactggatttctttttttcttttttctttttttttttttttttgagacggagtctcactctgtcgcccaagctggagtgcagtagtgcgatctcagctcactgcaacctctgccctctgagttcaagtgattctcctgcctcagcctcccgagtagctgggattacaggcgcctgccaccgcgcccagctaattttttgtatttttggtagagacggggtttcaccatcttggccaggctggtcttgaactcctgacctcatgatccacccgcctcggcttcccaaagtgctgggattacaggcgtgagccaccgtgcctggcctaaagaactggatttctaatggtgaaatctaagcaggagaggtgggatttgggtgtaggatacctttcaaatagccttctactccatctatgaaataggctagctttggctcagtaaatttgctgtgtaatgattttctaatgagttaggctggctttaagcccctggttatttcgttgtaaccagttaggctttgcctcttgaagggccacctgggactgtcgtgcagtagattttcttttaacgccccagaatcaggtgctttctctgactttgtgtggctctactgaatcaaatctagcaagccacagaggctttcagacttttaagatacaatattcaaaggtgaggcaggctgtgaaaagcccagcggtccctggctgtccctgaacgcgactatttgcaggttggctttgagaacccggtcagagctgcgttaggaaaacggttcccgggaagctcctcagagagtagaatgaggaggtggattttgtgtgaaggaacaccttgtgtggctctggtggccaggaaagagctggcacaagctgaaagaaggcctgtggcgaagcggagggggacctaagtcagggacccccacctgcccccaggaaggatgaaaaggagacaaaaatcctaaagggaaaagccctccaggctgtaggccaatgagcggcgggaaggaggagtgaggctggggaacttctcccagagccagtcagagcggacggctgctgggaagccaatcagcgcgctcgagcctgcagcccctctgcagtagttatgccagagcgccctgtgtagagcggctgcgagcgggcagctgggctcggctgccgggagccaccgcgcgggctccgcaccctcctctcgcactgccttcgcccggtccccgcgccgcggtgccccagtggcccccgccgcgctccacgccgcgcccccgcaccccgccggctaccggccgcacaaccgccaccgccccctggccgcgcggctcgcctcgccccgccccgtccctcctcgccccgccccaccccagtcagccccgccctgccccgcgccgccaagcggttcccgccctcgcccagcgcccaggtagctgcgaggaaacttttgcagcggctgggtagcagcacgtctcttgctcctcagggccactgccaggcttgccgagtcctgggactgctctcgctccggctgccactctcccgcgctctcctagctccctgcgaagcaggatggccggga

SEQ ID NO: 44507 - DNA, 2300 bp, Homo sapien
gtgttggtgagagtgtattggtgaatcagtaagagatgactagatctcatgctatatccccaggcattaagggcatgttatcacaatccaattcctttctgtaggccttgaaataacaggctgcatctatcagccatgctaattgggactggctaccagacttggggcctggaagtaactggagccactgatatctccctctcctgaactctctctgcacttcctttccaccttttaaggcactcagtgcactttatctcctattgtaactatctttttcttggtagactgtaaacaattgaaggcaagggctgtgtcttagttactgttgtgtcatacctcagcatagtgctttgtacataataggcagaagatgtctgtaccagccatagtctgtaatacagcatttatcacatcatactgtgtatgtttgcttgccgtctcttctttttgaccatgagctcaagggcagggattgagttgtattgatctaggtctccattgtgtttggaacttaatagttttgcaagtgtttattgaatcaaagtttgttgaaatgaatgcatggatgaaataatgaataaaagatagcaaaatgtggggatttggggggaaacttaaaaagatggcatactgcataggcattgcattttgtcagttacacaatcatctgtctcatcctggcatcagtaagtgtgtaaagctggtagaaaatgatgctggggaacctgtcttcatatacaccataaatgtttggaatacacattctggatcttcttatgcaaatctttagccactccctttcacagcatagggccttgggttaaagggctaagggttccttgcagctaaatggctgatttgtccacccttattaggtatctatttgaagagttcaacgtcacaccaccatggtcactgtttgcttgggaacttacactttaaagttgacattgcagagaaaagtaaaaagattgacgaaacagtatagaaacagcattggatcaagaccgtggaaatccaccgccactacaggaaaaatggctcttgaagagcatctttaaattttcactggtttaaggcttttttttgttgttaaagtctgtgaagcccatagaaaataacaaaagctaacccttacatagggcatactatgtgcctaggcattattctgtgtgatttacatatactatctcatttctcacaactaccttttgagacgaatactattatgatctccattttggacaggatgaaactgagggactgagaggtaatagaaagcgatcaaggtcatagagctagaagtggcagagctggagttcaaacccaagcatggctccaatacaccaaagaggaaagcactcgtctaggtgtctggtttacatgtatagattataaagaaaatcaccctatcttttctgattgtgataatcccagcatttatggagagtctgttatatgccagggatgctaataacacgctttagttgcattatttcatttcttccttaccacaaacccgtgaggtactatttttatccccattttaaagaccaaaaaaaaaaaggtatagaggttaaaacgattcgcccaaggattgaaatgcaggcagggtgactccactacaagcttctcagtcattcctggcaataaaacgaacggaggacctcaaagagatgccatgagagtacaatgaaataatggatgtgaaaaggcctcggcgaacaagtgcaagggataaggcctgtctacgtgaatcactgttgtgaactggttacccagggcccctgtccaacggtttccgtcccaatcctgccccttctccgcccagcccacagcgatatctttgaatctctttctctatctcctctgatcctgcccccaaacactcggcggagcggcggagcggagaatagaaggtccgcgcgcgaacaggaggcggggcctgccgccttcagtcgtacagggggtggtttctgcacatgcgctgtggctgtgcggcttcagctgccccctctctgcggccaatcagggcccgcggcgcgctcgggacgtatcaacgctctgtgggtcgtgtgcgtgcgaggggggcgacgtaagggcgctccgcgagcccgtctctcctcgaatgaaaggaaacaacctccggcgacagagccccgctctcaggcactgctggagaaccgagaccgacttctttctctttaccctcattggcgcttctctcctgcagtccgcctctgggccctgccggtgagtccccacggaaccctggggccccccattctctccccggc

SEQ ID NO: 44508 - DNA, 2300 bp, Homo sapien
ctgtctaatacagttgcaactagccacatgtagccaataagctcttgcagtgcggtcagtgtgactaagaaactgaagttttaattttatttaattataactgacttaaattttttaaggccacatgttgctagtggctactacattgaatagcacagatatatctactttattttcatttagttttccaagttacagtaagtgtattttctaggtaagtgttctaattttacaaactctttgaaacctatggtaaaaaaaaataataatgcaaaagcaaactctaaaaattaatttactaaactatttgtatttgatttttattgcatttatctgaaacattgggtggctttattgaacataccacagaccatttctcctcatttctggagacagtttcattctaaggagaaacatatgtcctaaagacccatgaactaatacttattttgagattggtccataaaaagtttttgttcatttttaagcagctgatttagaagaaagttttaatgaacatgaactggagccctcatcacctaaaagtaaaaagaaaagtcgcaaaggaaggccaagaaaaactaattttaaagggctgtcagaagataccaggtccacatcctcccatggaacagatgaaatggaaagtagttcctatgtaagtaaaaaaaactgttggattcttacttttgttgcaccatgaatatttcatttaaactatctataggtaaagttcatcatttgaaatgttaagtaagcttgaaataccgatagcatattttcatgattttttttaagttcgttttttcttttacatttgcagagagataggtctccacacagaagcagccctagtgacaccaggcctaaatgtggattttgccatgtaggggaggaagaaaatgaagcacgaggaaaactgcatatatttaatgccaagaaggcagctgcccattataagtgcatggtaagcatggttcttttaagcccaattttgtttttttgttgtttgtttttctttgtttcccctgtgatctaaagcccaaatgattttttttttaaaaatcatttagctagtaaccaaaaaatttccccccaccagcattagtattttagagttataaacagtatatcttataatcccaaatcttaagtttagattttgttaaattatagcctttatgttttagtaggatttgaagtaattctaattatagttactgtagttaggataatctgtaattaattatttcataactataaaaattttgtctttataagcatgtcatgaaatatattttagactttcactataacctaataattatctctgttgtacttaacactctatattacaattattcatttatgaacttatcttccctaacagactcttaaattccttgaagataagaataagtttttatcttgacatccttaggtccatgcctgacttacagtacacataaatatctttgacttagattgtattgaatgactcatcccattgataaggtttttaaaattacattatttatgtcagagattcttaaccagagtgcatgtcagatttacctggtgagctttttccgaaatatgtgcatctaggcaccctgtggaatagatctcgtatatgtctagtttgaaaaaaaaaaatacgcgagtgattctaatctgcatctatggttgaaatttgccaatttaaactattttttaaaactttgtggaaatgtaaaatagttgagaatagagtgacattgttgaaattttcattgcttaaagcaggctatttaatcttggctccacactggcagtcctcattttatttcaatgtccataattttggttatattttaatcagacatgtaaatatattaaaaatatttgagcagatacttgattattaaggaaagattatctttcttcggaaattaaatataacacacttgttatcacatttaatgtttctctcataaggattctgaatgttaattttcctgcatttttcttctctagttgttttcttctggcacagtccagctcacaacaacatcaagagcagaatttggagactttgatattaaaactgtacttcaggagattaaacgaggaaaaagaatggtctgtagtttttatatttgttatgcaacattacacttgatttgctgctttaaatttagagtacatcccaaatttatccagtcatcagaaaatttaaagtagttcgtatgttaaagcaaagtatatatttgacttatttgtaatataataaaggatgctgatgttactgaaacttattt

SEQ ID NO: 44509 - DNA, 2300 bp, Homo sapien
agtcccagctactcgggaagctgaggcaggagaattgcttgaacccgggaggcagaggttgcagtgagctgagatcattcaactgcactccagcagagcagcagagcgagactctgtctcaaaaaaaaaaaaaaaagtcttagaggctagaagaaagtgaactgtttaaggcaaaattattatggaacacgtaacattggtatcatcatgtattgagccaagctctatgctaggcacttttgcatatattattttgtttaatcttcaccacactctgtgacagagatattaacctcatttgacgtataagaaaccaagcacgcagggaccaaggatcttgcccaaagtcaaaatgctataatagtggggaacccaggatttgaactcagtccaaagcccatacatcccttttccattacagcctgctgcctctccaggataaagagggaagacagggaaagtagggaagtatggacttcacaaattcatacatgctaaaattataacagctactgtttcttgagcacctattatgtggcaaatactatatgaggtactttacataaatgatttttagaattctcgtaaaactcttcatggcagtagttattattctctctctctctctttttcttttttcttgagacaggatatttctctgttgcccaggctggagtgcagtggcacagtcttggctcactgcagcctggacctcctgggctcaagccatcctcccacctcagcctcccaagtagctggggctacaggcacatggccaccaggcccagataatttttcatttttgtagagactgagtctcaccatgttacccaggtttattattctcattttttagatgaagagactgaggtccagagaagctcaatgacttgcctagttttacaaatctcctgccatcacatacccctcagcgtccttaataagagggaggccaccaactatgtgctgggcactgtggtggatgctggagctatagggttgagtatataagaaatggtgttgctggagcaactgttgcttgcttacctgacctatctgagaattaattagcaggggaacatatttttgttttcagattcaatataagaacttgtgtgggcaaaaataaagatcagtagtaataacagtagttcccatttgctgactgtactgtcctaagtgcatatatatatacatacacacacgcatacctatactcctctaatactcaaaatgatcctgtttatgtattgttaatatgctcattttatttttaaatttttatttatttttatttttatttatttttgagacggagtctcattctgtcgcggaggctgaagtgcagtggtgcgatctcagctcagtgcgacctccgcctcccgggttcaagtgattctcctgcctcagcctccggactagctgggattacaggcgcccgcctccacgcccagctaatttttgtatttttagtagagatggggtttcgccatgttggccaggctggtctcgtactcctgaccttgagtgatccacctgcctcggcctcccaaagtgctgggattacaggcatgagccaccgcgccgggctaatatgctcattttagtgaggcaaaaatagaggctcagagtctgatttgtacaaaactacagagcagttaagtgtcctctcagatgtgtaccctgatctgggtgactctaggactctaggtctcaactgttacaaccagttaagggtttggggaagcactgggccaagagtcaggaaaatggaagccacaggtagtgcaaggtcttgggaatgggacgtctggtccaaggattcacgcgatgactggaacccgaagagccggggcccggtttacggccgccatgaagcaacgcgcgccggtaggtttgggaatcagggagccctctgaataggagactgagttgggagggaaaggggcttcgctgggggagcctcggcttcttctgggagaaaattcccacggctacctagtgagcctgcaaactggtaggcgccggcgtaggcgcgcgggcggggccgggggcggggcctgcggggcgtggcggggcgggcagagggcggggcctgcttctcctcagcttcaggcggctgcgacgagccctcaggcgaacctctcggctttcccgcgcggcgccgcctcttgctgcgcctccgcctcctcctctgctccgccaccggcttcctcctcctgagcagtcagcccgcgcgccggccggctccgttatggcgacccgcagccctggcgtcgtggtgagcagctcggcctgcc

SEQ ID NO: 44510 - DNA, 2300 bp, Homo sapien
agtgagcggagatcgcgccactgcactccagcctgggcaacagagcgagattccgtctaaaaaaaaaaaaaaagaatgttgtgataaaaggtgatgctcacctctcccacacccttttatagtttagggattgtatttccaaggtttctagactgagagcccttttcatctttgctcattgacactctgtacccattaatcctccttattagctccccttcaatggacacatgggtagtcagggtgcaggtctcagaactgtccttcaggttccaggtgatcaaccaagtgccttgtctgtagtgtcaactcattgctgccccttcctagtaatccccataatttagctctccatttcatagtctttccttgggtgtgttaaaagtgaccatggtacactcagcacggatgaaatgaaacagtgtttagaaacgtcagtcttctcttttgtaatgccctgtagtctctctgtatgttatatgtcacattttgtaattaacagcttgctggtgaaaaggaccccacgaagtgttggatataagccagactgtaagtgaattactttttttgtcaatcatttaaccatctttaacctaaaagagttttatgtgaaatggcttataattgcttagagaatatttgtagagaggcacatttgccagtattagatttaaaagtgatgttttctttatctaaatgatgaattatgattctttttagttgttggatttgaaattccagacaagtttgttgtaggatatgcccttgactataatgaatacttcagggatttgaatgtaagtaattgcttctttttctcactcatttttcaaaacacgcataaaaatttaggaaagagaattgttttctccttccagcacctcataatttgaacagactgatggttcccattagtcacataaagctgtagtctagtacagacgtccttagaactggaacctggccaggctagggtgacacttcttgttggctgaaatagttgaacagctttaatatacaataattgttgcattattatttcagatgataaatgtggtcataagtaagaaataaatgatcgagtttagtcttttaattcactgtcctttgaatacctgcctcttactctggaggcagaagtcccatggatgtgtttatgaacatggttgaggaagatttaggaagactgcaacagtacactacctaaagcaggttttttactccatctttttttgccacgtacactggcctcccactttgatatgcttgaaattatctccttgatttgtctttcaaaactacatattgaggctggttgcggtggctcacacctgtaatcctagcactttgggaggccaagccggacagatcacttgaggtcaggagttcgagaccagcctggcaaacatgatgaaaccccacctttactaaaaatacaaaaattagccaggcgtagtggtgtgtgcctgtaacccagctacctgggaggctgaggcaggagaatcactggaacccgggaggcagaggctacagtgagccaacatcacgccactgcactccagcctgggtgacagagcaagactctgtctcaaaacaaaacaaaaaacaaaaaactacgtattaagacaagaaacagactgggcgcggtggctcacgcctgtaatcccagcactttgggaggctgaggcgggcggatcacaaggtcaggagatcgagaccatcctggctaacacggtgaaaccccgtctctactaaaaaatagaaaaaattagctggggtggtggcgggcgcctatagtctcagctactcgggaggctgaggcaggagaatggcgtgaacccgggaggcagagcttgcagtgagcagagatcgtgccactgcactccagtctgggtgacagagcaagactccgtctcaaaaaaaaaaacaaaaacaagaaacaaattaaactaatgtgatagactactgctttgttttcaaaagatacactccccaaaagttactgatctaaaatacagtagtactatctctgtttagtaagaaccctgacaactaatagtgttcttatatgtaaaatgctattcttgcctttcatttcagaatatactttttaaatgtgaatttctggatttttttttatagcatgtttgtgtcattagtgaaactggaaaagcaaaatacaaagcctaagatgagagttcaagttgagtttggaaacatctggagtcctattgacatcgccagtaaaattatcaatgttctagttctgtggccatctgcttagtagagctttttgcatg

SEQ ID NO: 44511 - DNA, 2300 bp, Homo sapien
gggaatcttattctgtcctaaatcttttccttcctccacccagtgtctgtctggatcgaattcattcattcactcagtaggcactcactcagccaggcatggtgctaggcctcaggacctcgctgtgaaccagaaactgtccctacccccatggtgcaggcattctgcttgggagttggaggaggaacaggtaaaaaataattaaatattcaggttaacgatatattgtcaggtttgaggattgaggaaagggcgcagagagtggcaagggctgctgttttagatacagtggccaggaggcctccgatgaggtgacctttgaggagagacatgcaggagatgaggggacagtgaagaggatttctaagaacactccaggcagacagaacagcgacagccaaggccctgaagtgggtaggggcctggtgtgtgtgaggaacctcaggattgccatcatggctggagcagagacatgaagcaagaaggccatggagatgagggcagggagatcccggagtggggagatcagatggggctctgtgtatcatgcaaaggactttgcattctgttccaagagctgggaaggttgacataattaggaaaaaagcccagaaaagcagaggtatccatttttcatggtaaagatgataatttcaattaaaacacgattcctggatatatgtaatttgtaggccaaatggtgcccaatccctacctccctcaccccctcacttccctatccctaaaacctgtacctcaactcccgttcgtaagtgatgggagttaggaatagagaaatctcccggttgggttttctgagcaaagaggtaacatagcagctctgttatttctttcacgtctccaagggaaccatgactcacccttagctatcccccgggaatgtggccctcagagtgttcttttactgattcgtgattttgttatgtacacctggagtgatggaacataccataccagcttgtcagggttgctttgtgcaaagatcgatgacgtgtgtgaacccggatccatgcttggggtcctgagtttcaggtgccatggccagttgctagcaggttgtatgtgtgtgaccagcccctatgtgagtctctcagaccctgaaactccaaacaggcttccctgggcagagacattctgtccatgctctgtggcttgctgctcgagagggatagatcacatcctgtgtggcttcttcttaaatgaagaaggacattggaagcctgtgctgggcttctctggaccccccgatgtatatgtatgtatattaaagagagaccagggtctcactctgttggccaggctggtcttgaactgctagcctcaagaaatcctcccgctttggcctcccaaagtgctgggattacaggcatgagtcaccatgcctgatgtatatatttttccagctcccttcttttctgtatcatttgctattactacctcttagctattagtataaactgatcttgagttgtgtaaatctttctggtgattcactgtgatgggatgattgtgtcctctcaaaattcctatgttggagtcctgacccatggtacctcagaaagtgactgtatttgaagataggtctttaaagaggtcattgtaaattaattaataaggtcattagggtggactctaatccgatatgactggtatccttataagaaaaggaaattagcacacagacacacaatcagagggagaagacagccagtcatctacaagccgaggagacagacctcagaagaaaccaaccctgcctgcaccttgatcttggacttctagtcgccagaactgtgagaaaacaaatctcatgtttaagccagaacctagcacgtggtacttgttaaggcatccctagaaaactaatacactcactgaatgaggcaggtagctgtttcttttattttttgagacagagtctcactttgtctccaaggccagagtgcagtggagcgatcacagctcactgcagcccctgccttccaggctcaagccatcctcccacctcagcttctcaagtagctgggactacaggcatgcaccaccacgcccagctaatttttgtattttttttttttttttgtagagacggggttcaccgtgttgcctaggctggtctcaaacccctgagctcaagcaatctgccctccttggcctcccaaagtgttggatttacaggcgtgagccactgtgcctggatatggtaactttttcatatgctatttgcttgatgattatttttctgtttctgatataatgctttttattagagagttatc

SEQ ID NO: 44512 - DNA, 2300 bp, Homo sapien
cgagagaaggtacatcgtgtgtttggggtgtgggggacgaaggcatatgcaaaattaaaagacaaaacgttgtagagtatgaacagaggaagaggcgtattctttggctcttaaatcatttagccaaacacattgcagttcagaagggggtggggctatggcaactcgaaagtatcgattctttgtctattgtatcagtgaatgaccctctcctgaagtgacaagacgcccctttgtaatctcttttcgtaagtaaatttcagtctaaggggaaatatgtaaactaggggatcgaggtggctttttaggggtgtaactcgttgtactatcactgggagagatgaaaggggttagggtgaaaggtataaatgaatttgattccaagagcaatctggaagggaccttcgcctttgacaccgatgctgtttcgaatgaacttttgtttttctaagtagtcaactaaggaaatgttaaattaggcatgactttaacttctgacatgatggctcgtatatttgtgtggaacaaaatgttgggagaaagttgtggagttttacatgataattgtacatttgctaaacatgttttttttttctttttaagggcagtcaacgacatttttctccattaatcccaaagtcagtgtaaaagttgtttgtaaatatcattgccaaaacaagatggaatgtagagatacttgattgtcgcaatttagggaatggggttattgttactaatgactttttttttttaccatgacatagtgtatttgttaccactggatctcagtctggatgttataaattcgatacttaatcttattaaatactctgcacattttattaactaataaataggacacttaacattcattgtactggttttgaaaaaccgacttaatttgtaagtgtaacaagatacttacagttggataatttaaatgtctattacttgtgctgaaatgtatttaactttcaaaaccattacagttagtgctgattttgttgttttaacttttaggtttgtgattgaggatttcagagtgggttttttttttaatgcttaattgaatattgtattcaaacaaaaagagggcatgcatgtgacttgttgctaatatgtgtccattttaaaaaggaaaaagtggtatctaatgagttaatcattaaggagtatgcgcagtgccggccatttcaggacatgaaagtttctgtggagctgcttgaaacaggaaggagcgacttgacatcaagtatttaaactttttgatttatgttttgatagatgacattgataggtataaattataaataagtttgagtaaccagtttaatatgtaaactggtatttcatctacagaaagttctctgtcattgtttggagctctttaaaataactcagctggggtgtttaagaataaaaacactagcagtgagttaggacatctaatgcttttaaagatagatgtatatgtcgcaacgatagtgtaagaatcagctgaagctaccggtgaggttttggttattttctttcagtcatctgagtccatttccaataaaggttgtttttttgtttcgttttttgtttttttttaatggggacaatgaatgagacttgtaatatgcagcaggaagaagtttcaccaagactttgaaactggcaagaatgatccagatgtccaattgcctctacttaaccttattcgtctaccttcagaagtaattagattctcttccacactaattcgtatcccccatcgctctgcttttcacccactacgttgttccaagattcatcctcaggggaaaaaattgagagccacactttcggctccacctgcagctcctggaaatcaaatggtgaagttataagaagtaccttaacttggagtgaagtggcctagtcataagttttgccctattccttgccagggggtggggcggggcttccttcagtcatccagtctttattcacccgcaggtacccccagatcgatcccccttcattgactccgaggggatacagcagcaattcatgttttgaagtgttctaaatggttcaaaacgtgaggcgctgctataccccctcgtggggaaggtagaaggtggggtctgccggacgcgtgttcctgccaccaggtgcccgctccccgcgaggccggctcaggagcaggtaggtgggcgggggctcgcgtctctgtttccggcgggtcctcgcccttgtccacgcagcagggctgtagtccggggagggcagtattcctggctaggctggggcgcataggcggtgcgagtcgagga

SEQ ID NO: 44513 - DNA, 2300 bp, Homo sapien
taacatccagactgagatccagtggtaacaaatacactatgtcatggtaaaaaaaaaaagtcattagtaacaataaccccattccctaaattgcgacaatcaagtatctctacattccatcttgttttggcaatgatatttacaaacaacttttacactgactttgggattaatggagaaaaatgtcgttgactgcccttaaaaagaaaaaaaaaacatgtttagcaaatgtacaattatcatgtaaaactccacaactttctcccaacattttgttccacacaaatatacgagccatcatgtcagaagttaaagtcatgcctaatttaacatttccttagttgactacttagaaaaacaaaagttcattcgaaacagcatcggtgtcaaaggcgaaggtcccttccagattgctcttggaatcaaattcatttatacctttcaccctaacccctttcatctctcccagtgatagtacaacgagttacacccctaaaaagccacctcgatcccctagtttacatatttccccttagactgaaatttacttacgaaaagagattacaaaggggcgtcttgtcacttcaggagagggtcattcactgatacaatagacaaagaatcgatactttcgagttgccatagccccacccccttctgaactgcaatgtgtttggctaaatgatttaagagccaaagaatacgcctcttcctctgttcatactctacaacgttttgtcttttaattttgcatatgccttcgtcccccacaccccaaacacacgatgtaccttctctcggcgcattctagccaaacttccacaatgtcaagtccctacggggaaaactaaacaacctttaaagttttaattcgggagagacaatgtgaaattaatcacacatttctttccaagacataactaacttcttgcaaataagaggaaaagttcatttacattctgtcaaaaccagtcgctcccgaccctagcgaggctgacagtcggtcactgccccttactcagttttctctccccgcccctccatgttagttgttgttttttttttcccagtccgtttcctgagaatttcccggccgcactcatttgttaaacactttaaatgtcagatttgcccccatcccgcccgcaaaacgtgctttacaacccccccaaacgccacagcacttttttcagaattatcaccagatgtttttctgcctgccgtaacccacgttacagtcgggaaagacgccagccaccaagtccctttttaaaaaatcgcatgtcacctctggctccactcgaaaatggcgccgaaatcgaagaacttcttaaatttcattgcaagctttttgcaaaggtttctgggatttgcctgcgaagctgtttcgccgcgtccgagagcgagcgaacgtgcaagccagcgagggagacagggaggaaggaagggctggggaggcggagagacagaccgagcgagcgacacacggacagcgacggacagcgacagaagcggggcccgggacttgggagacggcgaggttgcggggcgcgaggtgctgggcacggagctacagggacggagagccgagagccggggtcgcagcgtggagggggcgctggctgctgccgaagctcggagagcggcgtggcggaggcggagcggagccgagcgaggggccagcacggaacgctcccttggaggcgagcggcgcagccggcggagaggctcccggagccgccctagaaaaagccggctcggggggcgtggccacgcgctgtggcgctccccgccccccggtggccccgctcggctccggggcccgggggcggaaggggggaggggaggagaggagctgtagggaagggggttgtgcaggcgctcgacgccgcagccttggcccgctgcgggggagggccgagaagggcactgggcgcccagagtaaccaacaccgagacgaatagcgagggctcggggagaaaaaacggaggatggcaaacggcaaagccaagggcacgaggtagcgcagcgcgcacccagaggctcctgggacggacaccaccccacgctcacgggtcctctggcggtgtcctttgagctgccgggacggcgcaaggtggctgagcgaagctttttgctcggtgcttacagggagtacctgagatggtttgggaaaggaaacagggggtctcagaccgcttgggtgcagcgctctccccatgcgtttgagtgcagatctgtcgagacgccccagccctcgccaccccaccaagctctcaggtagagaggccccgggaca

SEQ ID NO: 44514 - DNA, 2300 bp, Homo sapien
gactgtctcaaaaaaaaaaaaaaaaaaaaaaaaaaaaaaaaaaaaaaaaaaaaaaaaaaagaggctgggcatggtgactcacgcctgtaatcccagcactttgggaggccaaggcaggtggatcacgaggtcaggagttcaagaccatcctgaccaagatgatgaaaccccgtctgtactaaaaatacaaaaattagccgagtatggtggcaggcgcctgtaatcccagctactcaggaggctgagacaggagaactgtttgaacccgggtagcagaggttgcagtgagccgagattgcatcactgcgctctagcctgggcgacagactgagactctgtctcaaaaaaaaaacaaaaaacattatggggggtctggaagtaggcagaggagttgtgactttagttgcaggatggtatagaacctttttttttttttttttttttttggtgtgatgcttttaaaggggcaggggcgtgatgtaatgaaagccgtgttttttaacagattcacctggcttatatggtataaccctatgaactacaaactatggtaaacctaggactatttgaataattagaatatcccattctccatgccacactggagtgaactttcttatttgagaagataaagagtggaaaaatactatttatcatatacctattatgtatcaggagatgtactggattcttcccccaccccaggtattccctccctctctcccccttccctccctccctctctcacacacttgcacttgcacacaccagaaatcccaactaggacttgattttaattgacctttaaagtaatcaattttttgttaaattactcatacaaagcatgctatgaaataccagtaaatatcgggttaaaaattaactgaaagacagaaacttactattgtgtgctgatttgatggaacagaggagtgaaaatatagtacgcaccttctggattgagactgtggttttcgtttttgtttttgttttttggtagtggcagagcttcaaactggagaatgttctttttcatgcgcagtttttaaaaattgtcattaaatattttcacaaagttaaaacaacattgaaagtaacttgggcaacttagatattccctgtacttgctgtaactcaaataccaaaacatatttagagtttaggtgcatctatcattcgaggcatgtgatttctttacctgggtgaagcgaaagaaagttaaatcgatgaaatatgaaatgaaaatgagaatcaatttgtagaatgaaccataaaagaacgagatttttgaagagattattttattttgattgcagactgtaaattatcacagggagttgctgtaggaatgacattgaggcttacttttgggtcaatttgttcctgtcctgacccacccttggcagtggagacagctagaatttctctaactccatagaaaccagtctcactgttgctttaggactcgattctctccctacactgggcttcctttagtgctttgttatgtaaatacagcttcaaaaatagaataaatattctgtaggcattacttggaaaacgagcttttattttaaagatgtgtgcttatttaagtcgcagacagagctttaaagagctcttgatagaaagaaatatatttggcgaagagtcaaaacttttaaagtaactttaaaaggtgaataatttacattcgtatagtgtttacataatagggtgtgtacgacaaagccaaaacaacattgaaaataacctgagcaatttaaatattcttcctagtaactgtaaaataaaagtgccttcgaatggtacatttgctggcaggaaatttttttcatgttcccaggtggcaaggattctttcatgttcccttatatttgaaaactggtattagcgtttacttctcggactcagaccaattcccccttacctgtcagagaacatctagcaataaatgctgacaaagctacatagcaaagggcaaacctgtcacttccctttcagaaacctgtttatgcaccctcctgcaatcccaccacctgcccaggccaagtgagcccctctccgctactggtgtttcataatgctgggagctactttgatttcatgcattgcccttcaggtaagccacaggaacctcaccactggccatgccagatggttgtgaattggataagaacaaagaaaaatggaagtagcaagtggtggggagtttagtgtactatatgacttactcatatgcaagtcaataagcaaagtcccctgcctcttgtccttggatgctggataataataaatat

SEQ ID NO: 44515 - DNA, 2300 bp, Homo sapien
atcttctggttcactcattctctcatcaactgtgtttagtttgttgtttaatccctctgttgagtgttcttttttccattgcaatgcctatatttcggttcttttttgcattcacctgtatttttcaaactattctattcttgccttctagtttctattcctttttaaaacctctttcggccaggcatggtggctcacgcctgtaatcccagcactttgggaggctgaggcgggtggatcacccgaggtcaggagttcaagaccagcctggccaacatgatgaaatcctatctctactaaaaaatacaaaaattagctgggcatgatggcaggcacctgtaatcccagctactcaggaggctgaggcagaagaatcgcttgaacccaggaggcggaggttgcagtgagctgagatcgcaccattgcactccagcctgggtgatagagcaatactctgtctcaaaaaaaaaaaaaaaatctttgaacattttcagcatacttattttaaaatcccttttagattttcttattagctgtggttcttaaggtatgaattcttccattggttgcactggtcttatggtggtttatttcctcacggacttagtaagttctagctatgcattcatcctgagtcatagatacaaacacagattcatgtgctatataccacctgggtttgaattctggctctgccacttagtacctgtgtgaccttaggtaagttatttaatctctctgttcttcagtttcagtatctggaaatcagggctgttctacaaatgagttattaggttggtggaaaatgattgcagtttttgccactaatttcaacggcaaaaaccgcaattacttttgcatcaacctaaataatataagccaagcacttaggacagcatctggcacataattaagcacttggctagtgtaattactgttatttggcaggaattgttttaccttggagtcttatgtactttgggttatgtgactgcctactctcagctcaaagtggccagtacacttctgaactgtgttttttcccccatccccacttatgggccagcacttaccactactgactttccataggagctcagattccactcccgttcccaccctgccattcaaacccttcgcccaggatatgtgaccacctttggttcttctgtgggctgtgtagttgctgctgtggctttgagctccctcttcatttctggcactagaatatgtttatttttgcttttgctctctacaacatatttaaatttttgaaaaaacaatgtgttttgagcaggggaggagcttcctgcaacagctcaggcaaccatactgaccagtaatccctaaaaattctttcttttttttttaaattttaagttccggggtacatgtgcaggatgtgcaggtttgttatgtaagtaaacatgtgccatggtggtttgctgcatcgatcaacccatcacctacatattaagcccagcatgcatcagctatttttcctgatgctttccacccgccacagccccccaagaggccacagtgtgtgttttcccctccctgggtccatgtgttctcattctccctgagcattcttcctgaagaggcttacctctcatttggcagtgggctccttgagagaactggggacaaaggctggattcctggtgggaagggacatatattatttgtttttgtattccctatgcctgatatgtgtttactgagtaaagacacgaaagactgccttggcaacagcaagcactacaagtggccagctcactgcttgatttctctaagaattaccaccaccatgttgtaaccctcctccccgcccttcttcctgtgaatgagttctgtcaaggtgacatggcttctaacacatgacagtaggtatcattcaatcactgatgatctcaagggtgagtagctttcttttactctgtaaacaaaatgccaaactgggaaatgctgcagaggccacatattattctgactttcagagtgttgtttcgaaagcaccagagtaaaatgttaagcaggtagctgatgcaatctggcaaagtcagtatatagctctatttatataaagacacacacatatatcagaccatcagaaggatttgtataaagagtgactctcctatgaaggtaaaggccacccctcttcagttccagtgactgagatacatttttccaatcctgggggcaaatacagacacagcaagttccttcttccctttggaaatttggcaggtaagtcaagtctgtctctgttgccacattctctcgagatttta

SEQ ID NO: 44516 - DNA, 2300 bp, Homo sapien
tgtatttgcttgccttgtagcttggtgttttctaaatgatcttattaagagttcaccagtggctgggcgcagtggctcacgcctgtaatcccagcactttggagggccaaggcaggaggatcacgaggtcaggagatcgagatcatcctagccaacatgatgaaaccccgtctctactaaaatacatttatcttatactccagtctcccttaatggttgtaaaaattcgctgggcatggtggtgtgtgcctgtagtcccagctactcaggaggctgaggcaggggaatcacttgaacctgggaggcggaagttgcagtgagcagagatcatgccattgcattccagcctgggcaacaagagcgaaactctgtctcaaaaaaaaataaaaagaaacttagagcattttatcactattttatactgctcactacattagtattcaaataagttttaatagtgtagggcctcttaaacaggataattgttatttggttttatagtattacaagttcacttgcatttcgttatagaataaatagtagtcgtttatattatgaccactagaactctctaagacctgttgatatgaattgtgtcttacagtttgtgaccagcttgtaattattgtgaaggaacataatttggcctccaaatcatttctgctttgtgttattaaaaaatgatgatctaagggaaagcatcagttattttaaagatacaccttgtctttccaaattgttttttgttaactagtaagatttgtagtgatagcatatgatgagattttagaatggatttggatcgtgaaagcaaaacctccttattgcagttttaaagtgtttttgaaaatcatcaatcatagacaaaatattatatactagacttattagcctgtcttcccccattgctgcattgataataaaaattaataacattggtgtttttttttctttcccttctcatattgttctttattttagataagtgggataatggatatttctaaggcccatagtctttatttctctaaatttacgtagcttcacattcatttgggaaaagtgctgaagtcagtgtctgtctagcaacagatggcgctttgaggttggacacctggtgtactttttgaagactaaatgtactgcctttagtgcattaacgttcagtgatctaaagagctaaattttgaagaagaatatgaaaacttacctaggaagaggttgtacgccagtactgacagcagactgctgctttgtgattcagaaaatagtaaatgtttactttttctttccagttgctgtcatcctcacctaatcgtattcctagtagcagactgcatcagatcaaaagggtaaattttacttactagctcagattggaaattttttggattttacatttttattttaaagacgtagatattaaaatgaattaggatgcaactctggttagttggagacagattataattcttctggagcgtgtagataaaatatacaagcggcatgaatgttccactctactgtgattatgtcaatgaggtagaaaaagtctttttattttatttgaagcagagaactatgtggataaaaattgcagtgtgtggaagagttaatattttgtcagtgatcctgcctttttagcatatatgtttgtctttgcaggaagaaggcctggatatggtgaacagagaaactgcacatgaaaggttagtgctttgcaagagcagggcctagcctaataagtgtcttgtttgtaaacactgacggcccttccctttgtttattttagggaaatgcaaacggcaatgcagataagccaatcatgggatgagagcttgagcctggtaaagtttgctcatgtctgtttggttttcattttctagaaacttttatgttgttcactaggttcattaattttttcgcacacttctttccccttctacttccaaattgatacttgttttttgatctctgcttttccagcagaatattagagtctatacctttctccttggaaaatctgggtgtgttatagtagtaagtaagagctgtgatgtgctgaatttattatgaggagatgacactttatgtttacagagtgacagtgattttgacaagccggagaaattatattctcctaagagaattgacttcactccagtttctccagcaccttcacccaccaggggattcggaaaggtaggataactgacaagatattaagtgtatttcacaaactgagctgtttactctaaaacacacacaaatcaccccacttttaaagtatccaatgcctt

SEQ ID NO: 44517 - DNA, 2300 bp, Homo sapien
tgagcctgacacatcttatgggggaaccctgaggagatccagcagcgctcccctaatccatgggctcaggtgagcagggttggggaggatggagtacaggattcaggggctccttgcccccatgcaagcaatcttccttccttaaagtgcacgtttgagctcatttgggctcttcaacctgagggggtggcgacttgtttgcttgacagtgacttgggtcccaaggtggagtgaaagtttaatctccaactttgggcagtgtggaggaaacggtccccctctacctggggccatgttgtccctctgtaaaaggaactgcagaaagcttctggctcttctgacaggttgcttgccccgactaacttacaccagggaatgtcagatcgaagcccctggaactagatgtgcaacttgacacctgtctctcagagctgctatttctaagcttagtttaggaatcctggcattaacagatgtttactttaataaatcacaatttatctaataacttgtaattaagtggtatgttcacatcgtagtacgtgatttggatttgccctaatgttttcaggttctaaaactgcctgaaatgcattgcagtgaataaaaaagaagggtggtctgtagcttagggtcagtgaaaaggcaggttttagaaaacggtggagagaatcgactcttcaatttcagtggtagggtcttgtgttttcatgtcaataagtcatcgagggtctgttttaaggtagcatcttgtaatagtgaaggttaggttggctcacctcctgagcctattgtatttcacttttataaggagacaattcatcttaggtagagagccaatttgcgagaccctgtagaaatggcattagtccaaaaaaggagatgagagtacaattagccaaaaacatattaatcaagcacagtgaaggcaaagaaagagataatccttgctgttgaactgattataacatccatattttggggaaaaaacaggttgactttttcatttattaagtataattttgaaactgagggaatgtaggagtgactttttgctttcctgttgctgtccttggccctgcatttattttggttactataacaataaactggtctttttctgattgtcttttgaaatctcataagcaagcaattgctagggacttcagcaattctattgacctgtatttagactattgtagcaaaaacatactgttttttgaatcatgatttaaataatcactgaaaacacagcatgatgtgacacaagaaggggcaaggagaccaggcctggtcccagttttcactaactagctatgatcacgaatgagtcatttaacctttctgaggctgttctctctttgaaaattaagagagctgaattaggtgatctcagtgggccctgaaagcccagtgcagttcagttctgaaaatccttctggaattctcatccttattgtgggcatcgccctctgctaggcactgcagggatattatacaaagattaacaaaacacctctctaccaatgggtttaagacacatccacatttctctttaattaagagacaaagtaggtgtctcaagaagcatctcatctcccagtgtactctttgggttcaaaggagagagtgattgcattccgtttgtggattgaagagaggtttgtgccatgccttcactgaagggtatggcattcaagatggatgtggaaggacaggaaggattttaatagatgttggcaggagggagagcatttgaggcagaaggggcaacaatctcagctatgtttattccatcaaacagcagtgttcaaaggtaggacacatgtttagggtgagaggggagatgtcttgatccagctcatattgtagaacaatgctcctcaccccttttcgcatcatggcaaacacagaaaacagtactcattggttctctggggtaaacagatgaggctgctcaggtctggtggtaaccggtttgggggcgtagctctgaccagaagcagctagagtcaaccagtctggagctccgcctgcatcacctctcccagctgccccccgaccactgagatcagtatctctgcaaacccataatccacagcataccacttgggaagctctgcagagaggacggtgaggagttcattctctgtatgaaatgaggagccatggaagatttcgttgttaactagataactgatgctaatgtatttgaaagagatcttccattagaaaacattactaattttgttttttttgtttgtttgtttttgtttttttcagtgacctttcacaggttt

SEQ ID NO: 44518 - DNA, 2300 bp, Homo sapien
gctggtcaccagttttgccttgacatactcccactctgtgatgagtcccttcctccagcaagattcaatatcctaagtcccacaatctgggacaatgacccacagggtctcttgacagaccaacaaccataggtggggtcaactccacacccctaatcagcaggaagcagttggaagatgagacctcagccccagtgtcaaagatttgtcattggtgttctgaggggtgttacggtggtgggatgtggagtcctgagaataagcaacaatgagaaaggggccaggtgggccccaggtggggaagaacaatgaacacaaacaaccagagggcacaccttccacacagtggccccagcagcatgacctctttctgcacctacccgcctccagcatgaccctataaaacttccctccagcccctgcctctttgcagacagctcctctgcagtgctgcccattgcatccttgcaacatattttcatatattctctaataaatctgcctttcgttacctgtgactgtctccgtaaatttctttagcacctgcaccactggccagtcacacccacgacagagttaatatttctataactcttagaatagtgcctagcacataacaagtgttatgtaggtgtttgttaaataaaaaatccaaatcttgaccgggcgcggtggctcgtgcctgtaatcccagcactttgggaggccgaggcgggtggatcacctgaggtcaggagttcgagaccagcctagccaacatggcgaaaccccgtctctactaaaaatacaaaaaattaaccaggcgtggtggcaggcgcctgtaatcccagctacttgggaggctgaggcaagagaatcgcttgaacccaggcggggtggggcagaggttgcagtgagacaagatcgtgcactgccctccagcctgggcgaaagagcgagactctgtttaaaaaaaaaaaaaaaaaaaaaatccagatctcacccacgctgaggcatgattgttagggactctgtaattcctagtaagaaaaaacatttggttctgcttgctacccgttcttcaggacttttcctagttttgttgaatctaaaggtgcttgcaaaagggagctgagtttctcattagctatacgaactgtcatgatattcgctttatttttacccattgcgtttgttttcccacttctcttttgtctagtgcatccgaatggatgatctgaaaaagaaatcagcccctgcagacaaagaccaacaaaatcgagggatttaaggcatgagtggggatcacagaggtcggagcgtacaaattaggagtgaaataacatggaaaccccatgtttttctctatttcccatgaatattggcccaaactcctcctgaaagctgatgctccagcattttcaaactattggttcttttcaaaattgggcgccagggtccccaggccaatgccatcgaggaaggcgccgggccccctggaaacgctcctcccctttggaggcggatttcgaggcggggctcccacgcacgctccgtgcccgcgggcccattggagtggccgctggacgcgtgcgcaggacccgatgggtgcccggacgcggaagaactggcccagcggaggttcccgcttctgaagcgtgggaggcggaagagactgcaggttgtagattttggtcttggccccaacgggttcccccagaccattagaacccgagagaggaagaggaggcaccgcggcggcggctgagaggccgaacccccaacctgtcctcgaggcgggaggggggcagggaggggagaagcaccgatcccagggctgaggagcctccgggaccgggtccgggagcatggggggctggaccgggtccccgagcatggggagctggagccgccaaggccgcccggccgggtcctacccgactgtcaggtcctcggtgctagcgctgcccgggcagccgcagcatctgtagcccggccccgcttgtggtcctcagccggaaagatagcagcatgagttccgccgctgcctagtttcctccccctcctcttctccctcctctctcctcttcccagaccacctccttctttcccgcccctgcgcttcttttcccttaccctctgtcctcctccctcccctctgccctctcccttcccctccctcctccgcccccttcctctccctttcccccctctgccctcctcttatcctctctgtcctcctgcttttccacctatccttttccctccctcttccctcctccctccatccttgttttccctccatccttctttccttcatc

SEQ ID NO: 44519 - DNA, 2300 bp, Homo sapien
gccaaagataataactctctccttcattttttgtcagctcctgtaactttttcctccaattctgttattatggcctaatgctaaaatatttcatcttgaaaatcaaaaaaattaagcaatgttttcctctaatataacttaattctgtacgcttggcttttaaaaaatatgtctaaattctcaatgtaaaaaaaaaaacttttcacgcttttcctaagagttatgtattcacctgctatactcataaccctgaatacactcttcttgtgtctaattacatttaaacactttttcattgagtttaacttccaggctaactaaatgggcttccaataaggaaaaacagtcacactgcaaatggttgtggggtttgtttgtttgtttgtttgccttttcagtaactggcttaagaaacaaacttttatcttctagaattcagcagtttcactttcaagtaatgcgtaaatgggatatcagtctctccccagtgatgcctgctacctttatgagtctcccctggattcggctggtcaccagttttgccttgacatactcccactctgtgatgagtcccttcctccagcaagattcaatatcctaagtcccacaatctgggacaatgacccacagggtctcttgacagaccaacaaccataggtggggtcaactccacacccctaatcagcaggaagcagttggaagatgagacctcagccccagtgtcaaagatttgtcattggtgttctgaggggtgttacggtggtgggatgtggagtcctgagaataagcaacaatgagaaaggggccaggtgggccccaggtggggaagaacaatgaacacaaacaaccagagggcacaccttccacacagtggccccagcagcatgacctctttctgcacctacccgcctccagcatgaccctataaaacttccctccagcccctgcctctttgcagacagctcctctgcagtgctgcccattgcatccttgcaacatattttcatatattctctaataaatctgcctttcgttacctgtgactgtctccgtaaatttctttagcacctgcaccactggccagtcacacccacgacagagttaatatttctataactcttagaatagtgcctagcacataacaagtgttatgtaggtgtttgttaaataaaaaatccaaatcttgaccgggcgcggtggctcgtgcctgtaatcccagcactttgggaggccgaggcgggtggatcacctgaggtcaggagttcgagaccagcctagccaacatggcgaaaccccgtctctactaaaaatacaaaaaattaaccaggcgtggtggcaggcgcctgtaatcccagctacttgggaggctgaggcaagagaatcgcttgaacccaggcggggtggggcagaggttgcagtgagacaagatcgtgcactgccctccagcctgggcgaaagagcgagactctgtttaaaaaaaaaaaaaaaaaaaaaatccagatctcacccacgctgaggcatgattgttagggactctgtaattcctagtaagaaaaaacatttggttctgcttgctacccgttcttcaggacttttcctagttttgttgaatctaaaggtgcttgcaaaagggagctgagtttctcattagctatacgaactgtcatgatattcgctttatttttacccattgcgtttgttttcccacttctcttttgtctagtgcatccgaatggatgatctgaaaaagaaatcagcccctgcagacaaagaccaacaaaatcgagggatttaaggcatgagtggggatcacagaggtcggagcgtacaaattaggagtgaaataacatggaaaccccatgtttttctctatttcccatgaatattggcccaaactcctcctgaaagctgatgctccagcattttcaaactattggttcttttcaaaattgggcgccagggtccccaggccaatgccatcgaggaaggcgccgggccccctggaaacgctcctcccctttggaggcggatttcgaggcggggctcccacgcacgctccgtgcccgcgggcccattggagtggccgctggacgcgtgcgcaggacccgatgggtgcccggacgcggaagaactggcccagcggaggttcccgcttctgaagcgtgggaggcggaagagactgcaggttgtagattttggtcttggccccaacgggttcccccagaccattagaacccgagagaggaagaggaggcaccgcggcggcggctgagaggccgaacccccaacctgtcctcgag

SEQ ID NO: 44520 - DNA, 2300 bp, Homo sapien
tatgagtacagaaattcaaggagatattctgaggcatctcatttttttttttacttaaacagaagggcagaggaatcttggctttgccacttagtagttgcaacttgagtaaacccctctgggctttggtttcctcctgtgaaaaatgggcattgtgatggtgcctacctcaaagaattattgtaaactttaaatgcaatcacctatttaaagtgattaggacagtacctggcacatagtaagtgcccaacaaacggtagctattactaatctgtcttatataaggaatggagactccacatcatcctcatgtctgggatttaagtaatctaattctgcctaatatactcaagtttgtcttattctattcccagaatgaacaaagaatacatatttattaccttacatgtcataacttgtcacgaactatctcaagactgtcccattattttaagttcaccactgggtagctgagcagggttgatgattgaaccaatccagataagtatgtgaaaacattttgtaggccaggcgtggaggctcatacctgtaatcccagcactttgggaggccgaggcgggtggatcacctgaggtcgggagttcgagaccagcctgaccaacatggagaaaccccatctctactaaaaatacaaaattagctgggagtggtggcacatgcctgtaatcccagctactctggaggctgagtcaggagaatcgcttgaaccagggaggtggaggttgtggtgagccaagattgcgccattgcactccagcctgggcaacaagagcgaaactccgtctcaaaaaaaaaaaaatgttatccgtaaagtgctataccagtgttatgactattttaattaataactcccatttcactaggtttatttgccttgtctgccagttctctatatggttactaaaatgtgtggttttacaaaattattagcatggagttaagatttcagtactcagtgtggctcattaagtgatggtgaaaatttctaaaagagtagttcttaaaacgatatgagccatggcagcattcttagaatgtatgtagcttctaatactacctgaaatgaaaacactgatttgcattgatactaaattctgagatatttgtttttaaaaaagcctcactgctttaactcaaatctttgtaaattagctgaggtctttattttttatatgaatagctgtgaggagccagattatatataatgtaaaaatacacactgaggcaggcgcggtggctcacgcctgtaatcccagcactttgggaggacgaggcgggcggatcacctgaggtccaggagttcgagaccagcctggccaacatggtgaaaccccgtctctactaaaatacaaaaattaaccaggcgtggtggcgagcacctgtaatcccagctactcgggaggctgaggcaggagaatcgcttgaacctgggaggtggaggttgcagtgagccgagatcgcggccactgcactccagcctgagcaacaagagcgaaattccatctcaaaaaaaaaaaaacaaaaaactgtacgattatggtttaaaaaagaaagaaagaaaccacactgaaaacagtaattcgtttgccaaatgagctcagttaggttagcaccttagcaagaccctttgggaccaagtggcctctaagcacttaggtagcagtatctttttttttttttttttttcagacttttgcttttctaaaattacaaaggtgtagtgtgtctgctgttacaggatggaaaaatgcatcataggaggttagaagcttgttggcctcagtcataaagggataagaaaaatgagaattaggcatagggcaggaaggacctcactcctcccaacgctttcatttctaaataatgcttaaggaaaccatgccagggttagtaaaagagtagaggcacaaccacggtaagtgggcattggggaaagaggaaggagggcaggacatggggataaagcggtttcttaactgcgcgtgcgcccctggcaaagctgactaaggcgcctgaagtgacgtcattgcctgcatcacaacaggcgtcgtccggctgatagcttatcgcaggctctgaggggcgggacccaactgattgtcaaaggcggcagattgtagtttttgttttggccggaaaggcttaccatgagttgccagggctgagagagatggagaaggattcgcggcggtgacagattaaattccccagttacattatagacttggaggtgggggatcttctcatcgttagaggccccgatcatgggagataggcgg

SEQ ID NO: 44521 - DNA, 2300 bp, Homo sapien
ttgaacccaggaggcagaggttgcaggagccgagatcacaccattgcactctagcctggccaacagagtgacacgccatctcagaaaaaaaaaaaagttttttaattttgatgaagaccagtttatctgttttttttctcttgttgcctgtgcctttggtatcatatccaagaaatcattgtgaaatccagtgtcatgaagatttaaccttatgttatcttctaagagatttagagttttatcttttaagttaaagtctttaattcatttcgagtgaatttctgcatagggtaaaaaaaaaaaagggggttcaacttcattcttttgcatgtagagctccagttttctaaacatcatttgttgaaaagattgtcctttccccattgaatggtcctggcatcactgttgaaaaccatttgatcatgtattatgtaaaggcttatttctttttttttttttttttttttttgagacggagtctcgctctgtcgcccaggctaaagtgcagtggcgtgatctcggctcactgcaagctccgcctcccgggttcacgcaattctcctgcctcagcctcccgagtagctgggactacatgcccctgccaccacgcccaactaattttttgtacttttagtagagacggggtttcaccatgttagccaggatggtctcaatctcctgacctcgtgatccgcccacctcggccgcccaaagtgctgggattacaggcgtgagccaccgcgcccggcttgaaggcttatttctgtgcgctctattctgttccattgctatatgcatgttcttttttttttttttttttttttgagacagagtgttgctctctgtcattcaggctggagtacagtagtgcaatttcagctcactgcaacctttgcctccaggattcaagcaattcttgtgcctcagcctcctgagtagctgggattacaggtgtatgctaccacacttggctacattttgtatttttggtagagaagaggtttcaccatgttggccagactggtctcgaactcccaacctcaggtgattcgcctgcctcggcctcacaaagtgctggtatgcatctgttcttatgccagaactacactgttttgactatgtagttttgtaggaagttttgaaatcagaaagtatgaatcctccagctttgtgcatcttttcaaagactgctttggctatttggggtcctttaatattccatatgaattttcagatgggtttttctgtttctgtaaaaaatgtgattgggactttggtaaggggcgcattgcatctgttgatcactttgggtggaattgtcatctaaacattgtcccaatccatgaacatgaatgtctttctgtaggtgggttattaaaaaaaaaaaactacctatgtgaaaatgatacttgtatattaataaaaagtcaaataatatagcaatgtacaaaggaagaaagaacacattactccagatctcactactcattgataaccactgttaagtttctggtgaacatctttctgagcacctctcttacaattttacataaataggatccatttgtctcccatttaatatgtaatagttgttttctgatgtcaatgactagatttaaattatgtttgtctcatcatttacttaagcaaacttaccctgatagacatttaatttgttgtctgtgtactgtgagtaatttttattaatatcatagtattaatggccatccatagctattgtggactagtttcttctctgtcctagtagacctttaaaaagtttagggaaaactgtataattttgaatgcttaatgttgttgcttttgaataaagaaaagtacaaagtttttcatctaatcagttcctgcatatctgatgtactgtaatgcataaataatagatctttggtgtgataatttgtgaagcaataaagggcagagaaccagatacttgtttagagatttatttattctctagttcttctatagcctagtgaataaaaataatggtgcatccaaatgaaatcaaattttataaaaccataggaactgggtattcagtttattctcattttcctacctttacaggaagaagccatggatttaataaatagagaaacaatgtctgaatggtgagtactgtactttgaattactattctgataatttgtatacttaattatatcttttctttcagataggcaaactgcagttttgatttcttttgtaggaagctacaaagtgagatacagataagtcactcttgggaagaaggcttgaaactggtatgatattataac

SEQ ID NO: 44522 - DNA, 2300 bp, Homo sapien
ccaatctactctctatctttatgagatccacttttttactcccacaatgagtgagagcattgaatatttgtctttctgtccttggcttatttcacttaagataatgacctccaggctgggcgtggtgccttacgcctgtaatctcagcactttgggaggtcaaggcgggtggatcacatgaggccaggagttcaagaccagcctggccaacatggggaaaccccgtctctactgaaaatatcaaaattagctatgaatgcatgcgcctgtagtcccagctactcgggaggctgaggtgggaggatggtttgagcccaagaggttgaggctgcagtgagccaagatcccaaatatcttttctcattctgtagattgtctcttctcttcgttgaatgtttcctttgctgcacagaagcttcttagcttgatgtaatcccatttgtctgtttctgcttttgttgcccgtgcttttgcagtcttacccaaaatatctttgccctgtcctgaagcatttccccaatatgtttttctagttgtttcatagtttcagaaggaatgagagctagtattcgatacttcagtagggtaactatagtttacagtaatttattgtatatttcaaaataggtagaagagaaaaattggaatgttctcagtataaagaaaagacaaacttatttttttttttttttttgagatggagtctcactctgtggcccaggctggagtgcagtggcgtgatctcggctcactgcaagcttcatctcccgggttcacaccactctcctgcctcagcctccctagtagctgggactccaggtgcctgccaccacgcctggctaatttttttatattttttagtagagacggggtttcactgttagccaggatggtctcgatctcctgacctcgtgatccgccttggcctcccagagtgctgggattacaggcttgagccaccgtgcccggccagaaaagacaaacttctgaggtgatgggtatcctaattactctgatttgattgttacacattatatgaagatatcaaaatatcacctgaactccgaaaatatgtacaacctctatttttcttttctttttttttttttttcagagagcatctgactgtcacccaggctggagtgcagtggcacaatgatattggctcactgcagccttgtacctcccagattcaagcgattctcatgcctcagcctccagagtagctgggactacaggcatgcaccaccacacctggctaatttttgtatttttagtagagatgggttttgccatattggccaggctggtctcgaactcctggcttcaagtgacctgcccacctcaacctcgcaaagtgctggaattacaggcgtgagccacggcgcctggctaatttttgtatgtttagtagagatggagtttcagcatgttgcccaggctggtcttgaactcctgacctcaagggatctgcctgccttggcccactttatataccatgctaaggtgtcgtaggtactgttgagactgaaagattttaaggagaaaagtaacgtggtcatgtgtacatcttagatcgatacctctggctgctttctgggagatggtttagactgaggtaagagtggaagcagagttcaaacaggaggctactgaaggagtccaagcaaaaagtcatggggcctaaacaggttctgaggatggggtggagcctgaggcggtcaacaagacatgtctcggaagtatgaatagaagccactagccttgagtactcactgggtgcgtgtgtgcaggagagtgagacaggacaggaggcaagagggactgcctaaggagcgcagacagagatggccctctgtgagagcctccagtctgtctcttcaaggggaggcgggaggggaggggcagatcagaggacagagaaggaagaagtttagagcatgaatgaagaaaccccaagaggccaggtggcaaggccgaagccccgccccaggctccggccccgcccccagccccacctcttcttcctctcgcctcccacccccgagccgcggctcatcctctagggcggagagaggtggcatttgagtcctccggtatcccagcaggcagtgcagcctagagacgctgacaaaggagcggaggagcagtcgcagctgctttccgaggaagccggtgttgccgaggtgagagtcccccaccgtcccgtcacccacttcctctgacttcgggaaaatgtggaagttacgtggctgagagccccccgccaaagaatgacccatccgcacagccggagcttg

SEQ ID NO: 44523 - DNA, 2300 bp, Homo sapien
aaccatatcagaccctgtctctaaaaaataaaaatttaaaaaaaagaaaagaggccggcgcggtggctcacgcctgtagtcccagcactttgggaggccgaggcgggcagatcacgaggtcaggagatcgagatcatcctggctaacatggtgaaaccctgtctctactaaaaatacaaaaaattagccgggcatcgtggcgggcacctgtagtcccagctactcgggaggctgaggcaggagaatggcatgaacccgggaggcgaagcttgcagtgagccaagatcgtgccactgcactccagcctgggctacaaaatgagactgtgtctcaaataaaaaaaaaaagaaaaaagaaaaaaaagaaagtttgggggaagagcattccaagcagagggaatagtaattgcaaaggccctgaagtgtataaaagctatttagaagttcaatgtgccattcaataatgagaagctgacctcaggtgggttggttggttctataatctgagcccaaaaagcaaggaccactttctctttctttcttgctttcttccttccgtcctttctttttttttttctttttttttttgacagagtcttactctgttgcccaggctggagtgcaatggcactatctcagctcactgcaacctccgtctcctgggttcaaacaattctcctgcctcagcctcccaagtagctgggattacaggtgtccgccaccatgcccagctaagtttttgtaattttagtaaagatggggttttgccatgttgcccaggctggtctcgaactcccgacctcacgtgatcgacccgactcagcctcccaaagtgctgggattataggtgtgagccaccacacctggctgcaaggaccactttctaggcaagaaaaccaataaaagaagaaattctgagaagacaacactggctaagtagggaaggctctgttaccagaaggctctattgtagaagggcccagatgccagaaaatggccctgagccagggagccaatgtcactctggaaacaggtcagtagtgtgaagggagaggctctttcagatgtccctggcatgaatattgtggcaagcagaataatggagccccaaagatacccattttgtaactcccagcatctgtgaatatgttacatggcaaggaggtgtaagctaaaagaatccaaagtccctccaccgactgaagggactccttcttggccaaggagacctctcacaaaaaccttaaagactgaattcctggccatgacaagaagtgagattgaacgtgcctcattatacccccacccctttggagcttaggcacaactgaccagcattaaggttaaaatagagatcataacactgacaaaacagactctttatgactaagatacccaattataaacaagacctaaggctatgcaagtcaaaggttaaattgcagttgccagtcattgatcttgtgacatagcatccttatcttaaaacattcctttctgttgactcccaagttttagacagagctttactcctttaaccaactgcaagttaaagaatctcggaggccacctatgacctgtaaacccccacttcaaaatatccagctttttttggccaaaccaatgtataaactctatgtactgatttatgactttgcctgtaacttctacttccctgaaatatatgaaacagagttgtgacctaactgcctcatgaccacttactcaaggcttcttggatttgtgtttcttcctgggccccaatcactcatgttggcttagaataagtctctttaaaatattttagagtttgtttttttgttaactgaagaattaagtttgtaggtggaattaaggttgctgatcagctgactttgagatggagcgattatcctggattatccaggtaggcccaatataatcataaggatccttataaataaacaaaggaggcagggaaatttgtgtcagagtgatttgatatgagaaacgctcaacctatgcctttgaagatagagaaagtgggtcagtcatgagtcatgtggtgacctctagaagctagacaaagccaggaaacggattctcttctgcagcctccacaagggaatgaaggctggcatctaaactcaatcagcaaaataaattcaataaggaagatttgaagatcaaagaccttcctctctctggcttcacatttctcatcactaggtcagtgatgttcaaatcatttttaggtgatagttttatgtgtcaactgactgggccatggagtcaagagggtttggtcaagcattattctag

SEQ ID NO: 44524 - DNA, 2300 bp, Homo sapien
gctctgtgacttgccttgttaatgagacattggctaaaatggagcaaccttgctagtaatcaaaccgtgcaaattaaaacatcagtgagatacccttttcacctatcagaatgtcaactgattaaaagaatgtgaatgccaattgttaggaactgctgacggtatgttcatgtgtatattagtacaagctagtggaaggcagtttgacaatacgtatcaaaatccttacatgaaaaccctttgagctaagaattccacttctatgaatgtatccctggaaaatatcagaaaggtgtacaatgatgtgcatgcaaaatattaatctcagcattgcttatgattgcgaaaaatttgaaaccatccaaaaatccatcaacaggagatcagttaattattggccatccataaggaataacacacagccaataaagtatcaacatgggaacatatgcaagacatatcattatgtttaaaagcaaaggtggggacatatgttgttttgtttgtttggttttatttggtttttgtttgtttgtttttgagaccgagtctagctctgtcacccaggctggagtgcagtggcacgatctcggttcactgcaacctccacccctgggttcaagcgattctcctgcatcagcctcctgagtagatgggaccacaggcgagtgccaccacacccagctaatttttgtatttttagtagagacagggtttcaccatgctggccaggctggccttgaactcctgacctcaggtgatccgcctgcctcaacctcccaaagtgctaggattacaggcgtgagcgcccggactgcatatgtttatctgattccatttttgttttacgatttgtaaatatatctatgtgcgtatacatgtttgtgcttataaatatacgcaaacaattgataaaaacatatacaaattagtagtctttctctctagggggttatgagcctaggaattttacttttctcataataaatatgatgtttaatgttttacaagccatcagaaaaacaatattgaaaacttcagaaatttagaaaagttgctcaactgcactgacaattaaatgaatgcaaattagaagaataatgaaatgtactgcctatcatattggtaataaaaaaattaagattgttaacactcaaggtaacatagagccctgatctctaaacttttttgatcaatcgcatgtattagtaaaacgttttggctttgaacactaaatgtatatgtatatgtaattgttttcataaacaaagatggggtcatattattcctactgttctgccacttgtaaattcatatgtacagtgatgttcactgaaacaatttttgacatatgaaaaactagaaacattcagaatgtccatcaatagggatctggttaaataaattattgaccactattagtcaacatgtacatagatcactattcagtcatcaaagagagtgaagtagatgtacattcttgaaaaggtaagagcaatatatcaatacataaagtcgggaagtagatacagcaaacgtaatagtagttcatggcaagggtaggaggggaaagtgaagctatgcagggaatttgctttctattgttttacatatttctgctttgaaaatttctaaaaacttgattgaatgacttttccaatcagaagaatacgaaagatctaacacaaaaacagaagtattgcttgaattattcaagcagaatgcacacattttaatgtccagaaaagttgcgggttttgtatatttgtactagctcaagagttgaggattgaaaaacgttcctaaagggatgagacaacaggaaatgggtttgtgcttctgagttgctcaagatcatgcttatgaaggacattttatatcgttttgagcaagttttgtgttccttttgttaaaacttaaaaaactgaaaaaaacttaaaaattaaacataattttaaagaaaagacagcccgggttaggaagctaggtctcccacgtcagcacgtgccctgcccttcctggggttctggggcctgggccaggacagttaggctaaactgactctaggccacgcggaccccgtggggcggggcggaacctggcagggcgccagtgaccgctggggccagagccctgccgggaaaggagggcttccgccttgcagcgcagctcggatcagcagcagcccaggaggcctcccgcccgtactttcccgcgtccatccctctgtcccacggtcggtgagtcagcggagcctgatggaggccttgggctctgggcactatgtgggaggcagcatc

SEQ ID NO: 44525 - DNA, 2300 bp, Homo sapien
agatagtgaaagctgggtccggggggtcaccgccttctggtcccgcggtgccaacaatgcactggatatatcagcatttattattaagtttagtgagggcgggggtaggttagtgagggatttaaggtcatttgattatgaggtgagatggtcacatggggattaagtaattctttaacataacatctgtatgcagaagtacagtatacagagaaaagaatttacaatatagtgtgtgcatcagtaatttctaacagagccttaaaacagaaacagtctttccataacctatgattagcaagatattaatcagcagtaacagttgcagcaaaaactggttacaaacaatccatagaaacaggacgtgaagctagacaactggttagaccagaaattctcagaagggagtatgccttaaccctaaagaggcctagaagagccgtggcaagatgagggcatttatagccctatcttatccatatggacaggcacccttcatgcgttcatttataggctctccacgagggtcgcattccattcccagagctatgaacatcagcttttctgggataggaatctcggtgatgtgaaacctccctgactgcacatccattcataggctctctgcagggggaagcacatcacgtgctgttggctctttgtggcattccaacctggcattgtctttatacaatcctgcatgcaattttgtatttacaataatcaggagtatttcatcttttattccatagcaatagtttcagggggtctccctacaaagaaggaattaaagctgcagacagaactaaagttgctaatcagttgcactgaaaatatgaagattatcatcaattatctaatcatatgaactcttaaaagtggaagatgaaggcagagaggattagaaagaagccacatgagaaaaatttgacacccactattgctgactttgaaggggaagaaggtggcattgagccagtaaatatggcgtcctctacaagctgggaatggccctcatattacagagcaagaacactacctcaatcctacaaccacaaggaactgaattctgccaatagtctaactgaacgggaaagaaattatttcatagaatctccagaaaggaacatagcctcccaatactatgactttggtctagtatgacccatatggaacttctgacctacaaaacaataagatgataaatttgtgttgttttaaaccactaaatttgtggtaattcgttaagacagcaacaaaaagctaacgcaaagagaaaatccataggaccatattcaatagacacagaaaatgcatttgactgatttcatttcctattaagaaatagataaaattcatggagggtatcttgtaatttggaggaaagatatatcacatttagttgtactggtaggacacttttactgaatggcctgtatggatgtttcggaaatatgggtgctactctgctcatcaggacttacataacctagtcaacccaactgcgttgaaagtatctatggcaaacaagtgatcaaggtacacatcatcaataacaaaatatactacatcatgaacaccttgatatgataaactaacacacaaaatctttgctgtagtatacctggcaaaaataactgattctaatcatgagaaaacatcagaggaaagcaaatctagggacatttaaaaaaaattgttgaccaataattttcaaaagtgtcatagctgagggtttgcgaaggaacatggaaggacagagagcatgggacaaggaatagatataccaggctgactaatcagctttaaagaacttacaggctttgctctccaagcacatgggcttggacgtcaccaaaaaaatcctcactccccaaccgcctagaaagactttgccccacccctacggtgcgaccctgcctccttgaccagttaagccagccaccacatttcccaccacctgctccgctgggtgccccgggaccccctggcgcactaatgacctccaggccttctgggcagagcttgccaaagcgcctgggccctccccatggctccgcccacatcccggcttctcctcccgcgacatgcacttcccgctacgcctcggtgcagcccccggcgaagcccagcgcagctcagctaaactcagcggagccagcgcggcgcgatggaaggtcgagtgcagctgatgaaggccctcctggctcggcccctccggcccgcggcgcgtcgctggaggaacccgattccctttcccgagacgtttgatggcgataccgaccggctcccggagttca

SEQ ID NO: 44526 - DNA, 2300 bp, Homo sapien
atggcttgcttctaaccaatagaatgtggcaaaggtgatgagatgtaactcccatgattacgttagtttatacatgacttgtggggaaaagaaagagagatcagactgttactgtgtctatgtagaaagaagtagacataagagactccattttgttctgtactaagagaaattcttctgccttgagatgctgttaatctgtaaccctagccccaaccctgtgcttgcagagacatgtgctgtgttgactcaaggtttaatggatttagggctatgcaggatgcactttgttaaaaaagtgcttgaaggcagtatgcttgttaaaagtcatcaccattctctaatctcaagtacccagggacacaataggctgccgaaggctgcagggacctctgcctaggaaagccaggtattgtccaaggtttctccccatatgatagcctgagatatggcctcctgggaacggaaagacttgaccgtcccctagcccgacacctgtaaagggcctgtgctgaggaggattagtaaaagaggaaggcctctttgcagttgagataagaggaaggcatctgtctcctgatcgtccctgggcaatggaatgtctcggtgtaaaacccgatcatatgttccatttactgagataggagaaaaccaccttagggctggaagtgagacatgctggcggcaatactgctctttaatgcaccaagatgtttgcatacgtgcacatcaaggcacagcacctttccttaaacttaattatggcacagagacctttgttcgcatgttttcctgctgaccctctccccactattaccctattgtcctgccacgtgcccctctccgagatggtagagataatgatcaataaatactgagggaactcagagaccagtgccagcgcgggtcctccgtatgctgagcgctggtcccctgggcccacttttctttctctatactttgtctcttcttttctcagtctctcgtcccacctgacaagaaaccctcccacaggtgtggaggggctggccaccccttcatgactccatctttcaaggagacacattctccctttgttccatgaagaaacaagcggcactgttgtgaactgcctgtggacagggcaacatggcagagaactgagggcagcttttataacaaattaagagatttcttaatatttaaccctccttacattaactgctcgtggtatattattctttttaaaaaattatttatactttttgtgggtacataataggtatacgtatttattggatacatgaaatgctttaacataggcacacaatgcataatgatcacataatggtaaatggggcatccattcccctcaagcgtttatcctttgtgctacaaacaatccaattatacttttagttatttttaaatgtacaattaaattattttgactgtagtcatcttgtgctatcaaatactaggtgttaataatcacatcatggagaatggagtatccatccctcaagcgtggtgcattactctttgaatatgctgctctggattgtatttgctaatatgtggggcttctctattaatgttgcaaaatagggagccaataatctggttgagagatgaaagcagcagcaggaaaatgtgttcacagaacctcatacgagtggcgtctagggccaaggctccttgaatgcatacccaagggctgatgagaggtggggacgagtgctgccgaaggactcctcaactaccagaactacgtagggcccctaacatcccctcggagcgagctccccgcgccccgtacaccaccaggtctccctggttcctctcctgctccccgtcccgctacctcaggaaactttagcccagcctctccgatacaagccggcctccttgagggctttaggcccctcttcgccagtgtataccccacgacacgcctgcgtactagggaccacccggctttgtgggcggagtccatgagagggttggagccccgctcgtggccccgcccacccaagcctaggccggccttcgtggacacgcatttccggcgacgcctcggtactgacctctgcagagccgggtggagcccattgacgtccagcgaagcgaggagcagcgatggacggtcgggtgcagctgataaaggccctcctggccttgccgatccggcctgcgacgcgtcgctggaggaacccgattccctttcccgagacgtttgacggcgataccgaccgactcccggagttcatcgtgcagacgggctcctacatgttcgtggacgagaacacgttctccagcga

SEQ ID NO: 44527 - DNA, 2300 bp, Homo sapien
ctgagtgtcacaaaaatttgtttaaagttatcttaattataggcttcaagtcattactggtcccaatcaccaaaagaaagaggttaattgtatttctgttctctttcttatattcatcttccatattgtcactttttatgtttctccatcctttggaggtaaggcctcttgcttgggtattgaccacattgcagagaatgaagtgagggaaacagtgacaactgaaaaggtgagactgcaaagtaatacaaaagagccccttctactcttacaaatgccattcctttgtccctttatggaatcctgtgaagatgttcatgactgtgaattattaccctacccaagacatttgcagcacaaaagaggacccttgagatgataaaactagcatagatcaaggaataagtctcattcttgtaggaggaagaaaactgctggggcatcgttgttgagggaagttgggggttactgacattgttcaaaggatacctagaaggtccctgcccattctacctacctccagagccagtggacagagagcacagggaatatgctggacctactcagtaatgtaaactgcttccaagcacttttccaaccacttcagcagaatctgtgtttaaaactaaacagtgaatatgcttaacacaatctttcttcatacccatccaggaaggctgtcagcaccttgaattggccttcatgattagcccggtttcagtgttttaagagccctgtaaatcataaaaactttattttattaagcaatttgaattttatctctgatttcaaaaagattttgacctattatatgacaaactacaaattcgtgatgtttccactacttctgggaatacaaatattatcacatacctaatacagataataatgtacctccacctccacataccgccctatgaatcactgctgaatggcaaattttcacctatttaaatgaagagagagaagcaataaaataaacaacaaaaaaaacactcttgtgatttattcctcattcgtatgctctggaaaaataacacatattagaaatggggcagagaggccaggcatggtggctcacacttgtaatcccagcactttgggagggcaaagctgggggatcatgaggccagaagactgagaccatcctggccaacatggtgaaaccctgtctctactaaaaacacaaaaattagccaggtgtggtggcacgtgcctgtagtctcagctactcgggaggctgaggcagaagaattgcttgaacccaggaggcagaggttgcagtgagccaagatcatgccacggcactccagcctgggcaacagagtaagactccatcccaaaaaaaaaaaaaaaaaaaaaagaaggcagagagttgttgactgagtgctgccctgcaagcccaccttaggataatctatcgggatattgagcttttcccagagatagatggggtggcagaggcatgttagcacagtagatttcaaagattagcatgcagagatatgttgaagataatttttttttctgcccattagggaaggtggtaattgtattgtgtttcaggtcattcattaaacaagtttgtacctaaattaactacagttctgcattcctttctccactacctacccaattaaagcaatataaatgtaaatgctttttctgaagtatctaagccacttagctggttccctgataatgcgttaaataaaactgtgagaggtgttcaccaacaaatgtgtgagatgtatggcttgtaaccatttggggtatatgcttttagacagttttttggaaatgagggaagaaaaagcaccctttctgactattccttaccttatcttggccacattcagattaaggttcatttcctaagaggcacaaaactgcttgtttacaacattaatcgtctgggattggtcactggtaagatctccatttgcaggacaccacaggactctgtgtcaacatcagtcatagcatggcagggcatatagcttttgaacaagatatggaccccatttacagaaccagggagggaaaagtgccatattcattgagaccatttcttttcaataatgtctgacatttattgaaaataaggaaaagactttctccaggtagtgtattagagcagagcagaatgcaggggttactgtgttgaacaaaaggcacacatcagagagacagttgcaaactcagaatactgcgttatgggcaaaactaactggtccacaagagaaaatgagagactcgatttggctgccaggaacacctgggcctaggcaagaacacaa

SEQ ID NO: 44528 - DNA, 2300 bp, Homo sapien
caatctaccacagttacatttttttattctcagtatattatacaagagtaacattatcagagacaatgttcaaaatggcctatttaaatttagcagaggcaggactgcagtggtgaggccgtgaatccacccagaatacccctgactacatatctggatggatgcatgtacttttatatgcaatcctatatataatgtgtccttacttttttttttttttgagatggagtctccctctgtcgcccaggcgacagagagtgcagtggtgcaatctcggttcactgcaagctccgcctcctgggttcacgccattctcctgcctcagcctcctgagtagctcagtgctgacatgggaccagccaagcagaagaaaaaagtgttgcctgtattacagtggggtaaactggtttatcaccacagttgtaatgtatttatattgtatcaactaagcattaatggaacaacacttttcagaacagctttctctgaatactactgccttaatcaggcctgccagatattttgcatgtgaaaggttatggtgtcaccaggtactgttgcaattcacagaggtgaaggcaaatttgttgtgtcaccttgttggtatggggcaatagctggatctgtagttcatttagccctgctaggtctcctccttcagcttctccaactcctggggcagtatgtgaagttcatggtataaatctacaactcctccatctcctcacataaagaaaattaacatctttatgatgttgagtcatcctatcccagatccagggatatcctttcattttttgagtattcttttgttttcctcttcagcaataaaaaaagttttatgtggcaatttataatttttaatgtttatttctaaatccctatttattttgaattacttttcaaattgggtctttaaccaaatttatattatatatatatatatatattttttttttttttttttttttttttttgagacagagtctcactctgtcgcccaggctggagtgcagtggcgcgatctcggctcactgcaagctccgcctcccaggttcatgccattctcctgcctcagcgtccggagtagctgggactacaggtgcccgccaccatgccgggctaattttttgtatttttagtagagacagggtttcaccgtgttagccaggatggtctcgatctcctggcctcgcgatctgcccacctcggcctctcaaagccaaattatatattttaataggttattttctgcatatgtgaaatctagtgatgaattactattaattttgtactcagccacacaactaaattaggatacaaagtgtaatgcttaattttccttccccctttccaatttgtgaaactttgttatttctttcctttattcttatgtattaacacgtataatgtcatgtttggaaagcacccaaccattctcattttcctctttcaacttctcttgtgataatcaactgattgtcctccttttggtgtcttaatatagcaaattaagagatttcttagaatttaacccacctttcattaactgcttatggcacattacactttgaatatgctgctctggattatatttgctaatatttgggattttcccattaatgttgcaaagcagggagcaaataatctgactgagacatatacgaagaagcaaaaaaaaatgtgttcacagaactctactcaagtggcgtccagagcccagggttctgaaagcaatgtccaaggactaaagagtgaggggtcaggagtgcggcaggaggccgcatcgatctccagaacatggatcttctgctctccaggggcaacaggctcagcctccccgcacaccgcctgctgtcctgagagccccactggcgcgcctcgcataatctccgccctactcctctgaggctacacggcctcctccacagtatgagacccaccccagaactcctggcattgcccttccgcgccctgtgacgcaccagcgcactagtgaccacaagtctttgtgggcggagctcgcgcaagcgcctgggctctcccccatggctccgcccacagcccgtcccggcccgggcccccaccctcgacatgcgcttccggcgacgccttagcgctgacccccacgcaacccagcgaaactccgcggagcgcgcgcggcacgatggacggtcgggtgcagctgatgaaggccctcctggccgggcccctccggcccgcggcgcgtcgctggaggaacccgattccctttcccgagacgtttgacggagataccgaccgactcccggagttcatcg

SEQ ID NO: 44529 - DNA, 2300 bp, Homo sapien
gtggcaggacggagtgagtgcaagcaggggaaatgccagacacagacatctataaaaccatcagctcttgtgagactcactcattatcacaagaacagcatgggggaaactgtctccatgattgaattacctccacctggtctggcccttgacatgtgaggattatagggattacaattcaagatgagatttgggtggggacacagagccaaaccatatcaataggaattacaatatacatattaacttatcacattctactaccatggatattttaaaccacttccagtaagttgtagaaatcttacttccatttaggtttatttacctgcctcacttttaatacaaatgttttaagtatttcctctctatatattaagcatcacatcagatgacataatagtttctgcttcaaccatcaaacatcattttaaaaactcatgaggaggatggtctattatatctacccctatatttactctttccaattgttctttttccttcctgaaatgccatcatctttctgttatttctgtttagggaacttctttctgccattctttaagcataggtctgttactcacaaattctcttaatcttcttttatctgaaaatatctttatttccatttcatccttaaaagatgtattcatggatatagaatttgtagccccatctattgtcctagctactccagagcctgaggcaggaggatcgcctgagcccagaagttcaaggctgccatgagctatgactaaaccactgcactgcagcctgggcaacagagtgagaccctttctctaaaaaattatttaattgtgtttggcagcaggtggaaaagtggactaccaatcagccctgcaccacaccatttccttcagtttccttgatgctcagttttgtctttttttacatgatcatgtaggtaggacaattgcctaatcagtgtatatgaatctactacgttccttaaacagttacgtgggataccatagagatgatcaagtgtgacggcgaacaggtattttgagagttcttaaatacccacgtcaatctttgctgtgaaaactgggatggggtcgggtgaaccttcttcttgcggacagtttttcaaaagtcatgaccataacaaagtgtgagtatttcccggctttattaaacagtccgaaaaaacgctactgggttttgattggtttacatttaataaagattgaatgaaaccacaaaagggcttttaagcacaccggcaaaaaaaaaaaaaggccataaataagagcaaatgaaaacccgagacaacattgtatggatcaagaagactgctgagaaagggaaggacaacggggaaattcgccaacacagagatatacgtgaccagcaaatacaacagaaagggaaaaatgcacgcttgtgggtttggtggcactctttagcgcagaattactgcactatgcgcattaaagagaaatgcgaattaaagaaaggtcttggctggcaagttttcaggggagaccgtgggagaaggggagtgatatgaacaggcagagtcttctgcatgtgctttctgtacagaatcagcttagcggtccagactgtcctcctccactcctgctccaccctaggagacagtgtcacagcaatcgatccctggcagctccgcccttcaatccgctcctgccttgggaggcgcccgaaaagaggcagggctttgtgggcggaaccgggcggtgggcggagctgagaatgcagggcgggtctagtgggcggggccgctacgccgacggcctctctgccgggggcgaggctgttaggggcggagctatgctggggggcggggcccgcagtgacgtgatgtggagcggatggagctgtgcgggctcgtggaggagggaccgaggcagtggcccctgaagcaaggctcagtctggagaacccgagggcggggcgagggtggggagagggcggggcgagggtggggcgagggcggggcggacgtcgctctcccggcggccggcggggcgcgctagtgttggggtcccgccgtcctgaggctcgagctcttgcgggtcgatcggtcggcggggcctgcgcggggcccgggcccatggcggcgtcggcggctctgtctgcggcggcggcggcggcagccctgtctggcttggcggttcggctgtcgcgctcggcggcggcccgaggctcatacggcgccttctgcaaggggctcacgcgcacgctgctcaccttcttcgacctggcctggcggctgcgcatgaacttcccctacttctacatcgtggcctcgg

SEQ ID NO: 44530 - DNA, 2300 bp, Homo sapien
gagcattctatactttcctggggacaaagggcagagcggttgcctctggaaggctctgtggatatgacattggcagtattaaaacatatcccaaacccccaggccaactgttggtctgctcttaaacaatgtcttttcactaggacaagcattgggttttagaggggaacaccagggcagtctcttcaaaatggctagggagaagagtctttggtcctcaaatgccaagtactacatcactttgactttgcagtgtttttcagattgatggtgggagagatctggtgtgcagcatgatctcaccctctcccctgggtctaagcacccctgcacagcatgttaggatgaacagaagccccttccagtgtaacccaagaacaccctgtcagcaaacacacatccaacctcaaggagtgaaatgacagactctgttttaatgactcaaacatgggaggagtttattgttctaattatatttaatttctcaaaaatatgggcaggcttcagcatgtaagccacatgactttttgtccaaggccatgtccaccctagagttgctttatgacagcatccacacccatcttgacaggtcgatgtcacttctgtgcctgcccagttgtctgttgattaaaaagatcagcacattttcggtgggcttcttgcgtttgaaggatttgtctgacttcttgatgttcagtgcgggctccctgggactgcctttagggacttctttatccatgatgtgttgactccacccaacctcagtaaaacagcacaaccgaggaagtctgaaaaagatgatgtattctaggtaatcaagtgtacccggcaacctcttcctcactggcacaaaaccacacacacacacacacacacacacacacacacccatacacacacacactgctaccagcagtagtcacaggagattgctttgggtcatcatctgatttgaagcaccaaccatattgtttcttctatctgtcttacacatggggctgtgcagcagcctgatgggacccgggacattaaagacacactattgcatccctctaatcattacctgacacacacaggcttgttagattgtactcaaaacactacctcatagctcaaatgtcattgtaattcttatatccacactaattttaactcaattctatgttgctctttttcagagctgcctcttctcacctctgagttttccctgtacctgggatatgggcttccttctgaactccattattcatgttatgcagagtaattctctttggtaaatccatccatgacaaagttcagtactttacatttgcatttcttcattctacaacttgcaggctgctataatttgtttcctcattccaaatctctttatgtgactttagcttcaaataggatttgcctcctttgaaaatcactggtgaagcaggtatgaatcttactccaaacccctgtgtaagagataaactggacattctcaagtactaccgagtttctgtttctaaggtccatcctgctgattttccatcctgggaacgtaatcacagtggcttaaagattgtactcacctctgatgcctggccctgcctcatccccaaaaacccagttctgcatttcatttgaatctagcacagtgccaaggctaggggtggatgctcactgtgttctctattttgacctcccaagagagactaaaagacttgcccaagtgacagagaggtgagattggaactgagaaagcctgtatctgaagcttctgcttttacccactgctctatagtgtctctgtatcagtttgaacaaatgactctctgataacctccccccattaccaaacagggttggggtttatcaggtaggttagttagttaatggcacaaaaggatgctctatgatcttggtatatcaggatattttacctgtgagaccactcaggtttcttctgaagaaagatctgggccagagggtaaacagtaacagcttggcactccctctctttccttgagtcccagggcctgattggttcagcaccaagtgaagtcatagtcactatggtgactcacaattgtcctcagaacctagtgccaacagtctgcaagattcaaacactggccaccatgcctggcttccttctggttcaagcctgaataaggtgagtggaagttgctgggagaggaggtgggtatatcctgtggctgggtgccatctgcatgtctccttcctagacagaaccctcaactaccctggcctcagagcttgttcctggcttgtataaaatccattaaaatttctcctttctg

SEQ ID NO: 44531 - DNA, 2300 bp, Homo sapien
ttcacagaggggctcctgtttcatggcctgtgttttctcagagaaataagaggaaatgtgtgcttacctgtgtgtcctaatttttcattgataatcatagaatattggagtaatcaaaatttacaagagcagttgctgtgggttgaattttgccctgaaagagatatgctcaggttctgagctccagtacctgtgaatgtgactttattttgaatagggtctttgcaaaaaaaaaaaaaaaaaaatcaagttaagatgaggtcctacaggattgggattagtcatatacccttaatccagtgagtggtgtccttataagaagaggtgtattggacacacagacagatggagaagagcaccatgatatgaaggaggaagagattggagtgatgcatctacaaccgaaggaagccaaccgatgactactggcaacctacggaatcttggaataaactctccctcagagcttgccagaaagaaccaacctcacggaaaccttgatttcagactcatagcctgcagaactgcagaagaataaatttctgttgtttaaagccacgcagtcgtagtaatgtgttgtggcctccctaggaaattaacacagttgtgttacattttgagacatagatagccctcaaccgatcctgttaaccagatgataatcttcagcaatgctcttacctgttctcacagtaggagaggaaagacaaacaggtttcatccacagtgcccatggattgcatcagaatcatccaaactgttctccttgcttcctgctctgacctcttccagcctgttcacaaccaagcacctggagtgatccctggaggctccaaatccttcagggactttacgtgtcatggacaataaaagccaaaggacttccagtgccccactatcccacatgcagcctgaacctctattatctctcttaccatacttcccactcttctagctattcactgcctctgctctaatcactgcttttctttgaatacatcacgcacagtcttgctgtatggtctttgcacaaactgtgccctccgtctgaacggctcctccaaaaatagctgcctggctaactccaacatctttctcaactattgctttccaatgagggctactctgaccatgctattgtaaagtgcaatccaataccccatgcccagcactgtggatctcccttgtcctgctatatttttccatggcatttattgccttctaacataccatatattttattatgtgatgtttagtgtcaccctttcgtcatcctgtgaaaaatctaccctcacagggtgaagattcttgactctttcattcattaacaaattttaggaacacagaacagtgtctggttcacagttagtgccctacaagttttgctgaatgaatgaataagggtaatgtgtatatcagagtaatgtaagcataaccaggtaagcgatgagtacatggtagcaatgatcataaaaggattctattataaattatcactggactaaaaatggcagtcctagtacacaagacacgtacttgccatcactaaaacattgcctacccacatgatgccctctctccacaaaattgatccctggtgaggagtaactattgaccgcccactgagtggtgactccttatgctaagcaccacgaatacaagggcaggagcaggatttttggttgcacagccggtgtttcaggcacccatcctcccagggaacccaagagaagagccctgtatctccttagtaaatgcagaacccaagctcccaagccattttccccaggccatcctaatggctccctcagccttgatgggagaagccacgatgttcccacccatcgccttttagtagccacaagaacctgcccgcccacccactgcacgcccattggttggacagtggtagaggcgggccctgacgagcgcatgctcagagggagaagtcagcggagaagctgggagctcctttggaggctgcggtgtccctgactctcctgaggggggctcactaacgggtgggtcccatgccacagtgtctgaggagaagcaggaagtgagtccctgaggagacgccgtgacctgagggcttcccttactgaggaggcctcgtgcttcatctgccacaagcggtgcccaggccggtggtgacaactgggacgatgctcaggcttctgagacttgctttggccttctacgggaggacggccgaccctgcagagcgacagggcccacagcagcagggcctcccacaaggtattcctctgtgtgtccccttgtcccccaccccagaagcc

SEQ ID NO: 44532 - DNA, 2300 bp, Homo sapien
gtggtcacacagaagaccaaagaacttatttcaagaaatggggagtcctcacctgcgtcaaacactgagaggttgagtgatgagagcttagcatattgaccactggatttggagacctggaggtttcctgtcatcttaagagcaaattaggggcatgatgtgggtaaaagcctaatgccagaggaataaggagagaatgggagctcaggaagtgagcagaggtgattcttgaaatagcatttgctgtgggggacaggatgcagaagaatgggactgaaggggaaatgaggccaaggaagcttatttatctatgtacatttttaagatgggagttatttgtgaagtttttaagatgggtgattcttgtgtatgtttgtatgttattcctttgcaggcaaagattaaaaaaaaaaaagattgttgatgcaggatgaagagaggcaacagcaatagaagcaacatcctcagagaaaatgtgtcaagagaatggttccatgtgctcagtggagtttcagccctggccaggggctgcgatgtccttccattgttacaaaagagaaggaagagaaagccaggatgggtgccaggagtttcacagaggggctcctgtttcatggcctgtgttttctcagagaaataagaggaaatgtgtgcttacctgtgtgtcctaatttttcattgataatcatagaatattggagtaatcaaaatttacaagagcagttgctgtgggttgaattttgccctgaaagagatatgctcaggttctgagctccagtacctgtgaatgtgactttattttgaatagggtctttgcaaaaaaaaaaaaaaaaaaatcaagttaagatgaggtcctacaggattgggattagtcatatacccttaatccagtgagtggtgtccttataagaagaggtgtattggacacacagacagatggagaagagcaccatgatatgaaggaggaagagattggagtgatgcatctacaaccgaaggaagccaaccgatgactactggcaacctacggaatcttggaataaactctccctcagagcttgccagaaagaaccaacctcacggaaaccttgatttcagactcatagcctgcagaactgcagaagaataaatttctgttgtttaaagccacgcagtcgtagtaatgtgttgtggcctccctaggaaattaacacagttgtgttacattttgagacatagatagccctcaaccgatcctgttaaccagatgataatcttcagcaatgctcttacctgttctcacagtaggagaggaaagacaaacaggtttcatccacagtgcccatggattgcatcagaatcatccaaactgttctccttgcttcctgctctgacctcttccagcctgttcacaaccaagcacctggagtgatccctggaggctccaaatccttcagggactttacgtgtcatggacaataaaagccaaaggacttccagtgccccactatcccacatgcagcctgaacctctattatctctcttaccatacttcccactcttctagctattcactgcctctgctctaatcactgcttttctttgaatacatcacgcacagtcttgctgtatggtctttgcacaaactgtgccctccgtctgaacggctcctccaaaaatagctgcctggctaactccaacatctttctcaactattgctttccaatgagggctactctgaccatgctattgtaaagtgcaatccaataccccatgcccagcactgtggatctcccttgtcctgctatatttttccatggcatttattgccttctaacataccatatattttattatgtgatgtttagtgtcaccctttcgtcatcctgtgaaaaatctaccctcacagggtgaagattcttgactctttcattcattaacaaattttaggaacacagaacagtgtctggttcacagttagtgccctacaagttttgctgaatgaatgaataagggtaatgtgtatatcagagtaatgtaagcataaccaggtaagcgatgagtacatggtagcaatgatcataaaaggattctattataaattatcactggactaaaaatggcagtcctagtacacaagacacgtacttgccatcactaaaacattgcctacccacatgatgccctctctccacaaaattgatccctggtgaggagtaactattgaccgcccactgagtggtgactccttatgctaagcaccacgaatacaagggcaggagcaggatttttggttgcacagccggtgtttcaggcaccca

SEQ ID NO: 44533 - DNA, 2300 bp, Homo sapien
acccaaaactcctaggtggaatctgtaatccccaatgtgatggtatttggaggtggggcctttggcaggtaatcaggtttagatggggtcattagtatggagcccccatgatgggattaatgcccttatggaaaaaaagaaaaaaagacatcagatctcagtctgtctctttgcatatacacacaatgaaaaggccttgtgaagacatgactaggaagaagacccttaccataaacccaacaacaatgctggcaccctgatgtcagacttccagtttccagaccatgagaaatgtttactggttaagccttcatcattttcagattcctttctgtaaagacgtcttaggtatttgctatagttgtttgttttactccatctcaactttgctcacttaaaaattacgcattcttggtttgtgggtttgactttggaaactctttttccttctttatcttgctcatcatgaccttattcaaaattacaatattctctttaagttgcttccacctataaagttgtttgcagctcaagatcacaccttgatttattgggtgaatcaaggttgaagtgtttaggggaaagaaaatgacttttatctgaccatcctcactggttagtgattcattgaaatgtaagcctggggattatacagaagtcacagtgccctgacttcctcttcattgagttataaaatgttatgttgaaaatgcctgacttgaagaatatagttttgaaagaaccattctgaagacgatgctctgatgaaccaaacatttttactaagtttatatatcatagataatgcactgtgtccttttacacacctttggggagcttcgattttgaatgatgattgactttaacttagtgtcatctgcatttatatatagaatcaaacaggtgctttttactttcctcctggacatgcagacatctctttggcttgtctgagtggtttttcacactggcttccaaaatatgtcagtttcatccccattgtaaaactaagctacacccagtttctcctgtttagattcacattggcaatttttgtccaaatggctcaacacttggtaaatactgaaaacttggagaatactgacaacccaagatattcagcttcttagaaagatgattctgtaaatatgaaataccttgcccagagaactatgctaagcactgcaggagataaagatggaagcaagatttctgtcctccagggaaagcataatgtagtagaaaaaggacaggatatgacaacaggatacctaaattcctggctaaaatctgccactggtaatctatgtgaccctgaacatgaagtagtaggtgaagtcatgtcatgtcataccatttcaaattatttatatgtcaaagagaagtataaatgggacctatctcaaaaggttaaaatctacctaacaagaataaaacaagataatggttggggagcacatgtctgataactagaatatggttttgaaaatgtaagggactgttgtttctgatctagcgagaggcttgaccaggatcaaattgccttttactcaaggaggcttttgataagtctagtgactacagctggagctctctctggctgggactcaggaaggcccagaacacagctctgcccacaagagtgctgaactggttctgactttgtgagccactcttccgtggcccctagacctttgaggtggcatctcttactgggtgaggctcctggtagaatgggctgccagccgccaggaagccagcaggaacaatctggatgcacaatacgtggcaaatcagggataggagaccttggcaccaggagtctgtaagctacatggctcccagggaagagccatttgaggggctcctctaggcttccagcagggctagagactcggtagcattaactctttcttgcatccaggacctaactggagcaggaggctggttcttctgggatggaaaggacccccgggacagttcctaacttggctaggctgagacttcgcaggtagagggagggggatagctgggcgtagctgtcacaaagccaccggaaatgcatctttcattttctggttgattccggttcaggtccacagaactcgaccctggaagagagagtcggggtcaggtcttcgggaggtggagggatcgaatgagggaactgatattccaagactccccacatcttggagcttcactcgccaggcatcccgcgctttcctgacgtcgcttcccctagtggtgcagcagcggagagctttgctacccagagcagcagggaggcgtggccacag

SEQ ID NO: 44534 - DNA, 2300 bp, Homo sapien
ggagtgaggactaatgtggtaggaaaacgcaagtggaagccactagaactgtctttacctaggaaaatagcaaaccaagagcaataccatactcctagagagattgcaagagattagtaataccatcagtgacttcaaatatgcagacatccccatttaactcacctgtttggcctatgcagaaggcagatggatcttggaagatggtagtgggtcattgtaaactaagccaggtgatgactccaattgcagctgctgttccagatgtggtttcatttcttgagcaaattaacatatcccctggaacctagtatgtacctcttgaccttgaaaatgctttttttctcaataactgttagtaaagaccaccagaagcaatttactttcagctggtaagaccaggaatacaccttcgccatcctacctcaggcgtattgtatatcaattttcaagccctacatcatagtttagttcacagggatcttatcacctttctctttcacaagacaacacactagtctgttacactgatgacatgctaattagacctagtgaacaagaagtagcaactactctacacttcagggctcctctaagtatccattggctccagtttgaaatctcagtatccattggctcaatgactttcatgctgttttgtaaggaaaaggctcttctgaaaacacttctgtgctaggtccatggtgtatgatctaggaaccaacctgctatcacttatcatcatgacagggctcgatagaaaagaaaaattatgacaggaatctgcgtgtaaatcttcaatagaaaaccagagtctgtccatttggacccaacaagagaaagggatggtttaaactcaaggtttttatgatgccatgacccagagtgaatgtgtgtatgtgcttgtgtggagggtgtggggagaaagcccatttcagtacacacatgtcccccataggtcttcggttcctcccccacattctccagctgctcctgttcctctcaattagacaagcttacttgggtggccctggggcaatgaccccaaagcctcagtgccaaactgtttaagttcacaattaactgagacccatctctgcagaggagaccagactgctgcccctaacctaacagcagctcacagtttcaagcactagctgtgtgccagcagtgcgattattacggacatactgctctccctttaatcctccaaacaaccccagaagggtctattaccctttctgcatttgaccagtgcagaaagtgaagcccagccaagcaaaagtcacttgcccaaagtcgcacagctagtagggagcagagccaggagttgaaagccccctttgatctacctccagagcggacactatgacagcgacactgcctccccgtggaaaccaaaagcaatagcacactcttcactgcactggggggaaatctggaggatgaaggttccagagaagacaacaacaacaacaacaacaaaaaatcactggcccgtgtaaggtctactcagggcaatcaagaaaatctgaatggggaattaagacagcgagatgtctcagtcctctggacccaccagacccagaaccctatgaataaaggggaggctgggcctccttgaggaagatggcagataaaacctctctctcactcacctattccctcagtttcacaagctctctcttttaaaagtcatacatatactttaaaagagttacagcttcttcacagctcgcccgttgcagcttctgcaccctgctgtggatgtcctgggacaggatagtcaggaactcctccaacaccagcaactccagaatctgctccatggagcgcatctcaggccaaagtcacccatggcgaaactcccatggcgaaacacccatggcgaaactgctggtgtcccgggcaccagcagcctcttggaagcagaaccctcagaagcacaggtgggaggccgccaagctagaccttgggtcgggcgggagcagcaggagttctggctccgggcgtaggaacttccatagtttccctctcacaggaggggaaccttttccgctcgcgggagcccaggccagacgccacagtcaggcttccagaccaccttggccccgaaaccagttgtgcccgccggccaaggcgcccggggccaggagagagagatgatggcttcagcaggagtccggcgtgctccggtttcaagttccagccggtgagcccaactttggacccggcagagctgtctccagtagcttcgcctcactgggcttgggacgctgcagctcctgtccccgtttcgc

SEQ ID NO: 44535 - DNA, 2300 bp, Homo sapien
tctctgcagaggagaccagactgctgcccctaacctaacagcagctcacagtttcaagcactagctgtgtgccagcagtgcgattattacggacatactgctctccctttaatcctccaaacaaccccagaagggtctattaccctttctgcatttgaccagtgcagaaagtgaagcccagccaagcaaaagtcacttgcccaaagtcgcacagctagtagggagcagagccaggagttgaaagccccctttgatctacctccagagcggacactatgacagcgacactgcctccccgtggaaaccaaaagcaatagcacactcttcactgcactggggggaaatctggaggatgaaggttccagagaagacaacaacaacaacaacaacaaaaaatcactggcccgtgtaaggtctactcagggcaatcaagaaaatctgaatggggaattaagacagcgagatgtctcagtcctctggacccaccagacccagaaccctatgaataaaggggaggctgggcctccttgaggaagatggcagataaaacctctctctcactcacctattccctcagtttcacaagctctctcttttaaaagtcatacatatactttaaaagagttacagcttcttcacagctcgcccgttgcagcttctgcaccctgctgtggatgtcctgggacaggatagtcaggaactcctccaacaccagcaactccagaatctgctccatggagcgcatctcaggccaaagtcacccatggcgaaactcccatggcgaaacacccatggcgaaactgctggtgtcccgggcaccagcagcctcttggaagcagaaccctcagaagcacaggtgggaggccgccaagctagaccttgggtcgggcgggagcagcaggagttctggctccgggcgtaggaacttccatagtttccctctcacaggaggggaaccttttccgctcgcgggagcccaggccagacgccacagtcaggcttccagaccaccttggccccgaaaccagttgtgcccgccggccaaggcgcccggggccaggagagagagatgatggcttcagcaggagtccggcgtgctccggtttcaagttccagccggtgagcccaactttggacccggcagagctgtctccagtagcttcgcctcactgggcttgggacgctgcagctcctgtccccgtttcgcttctaccaggacctccgggaggcacaaaagcaggcagctttctcctgtctgtgttggacccacgcaggactaggcccccggtccacacgcagaaagtcctagcacggaagtttggcgtccacagaccaatttgtcagcttaggaccaacgttagggctgcgtttcccgaacgacaccattgtatcaagcggccattggatcaggtctagccacaattcgcagctgaccaatcagaaaagaaaatttggctccaggacgggaccagcgagggaccaattgaaagacaagaggcggggcccgcaggcaaaccttaaccccagagacctccgtggctgttgaaggcagagggtaatgggcgggttcgctagatcgaagcttaggtcttgaagatggggatactaaaaagcaaatccaaagccactgtgaactgcaggcggacgaccggagtcaaaatctccaggatggtttattaaaatgcgaatccccgggttcctgtgagattcaatgcgtcagggtagcgggtggagccccgaaatacgactttttaacaagctctccctacaaattctccccacacagccaggtttaagaatcactgaccgggtcgtaacagatttaaaggtggtccccacccgctccagttactccaaggctcaaggagaagcgctcatttggatcacgacccggggttcgccccacccaacaccctgcgactaagaagcgcttaaacaggaaacgggagcccttccaaaacagcttgaggctggttggaagccaggaagagtcccagcccctcccacgtcagcatccctgtgggcgcacagcccggcgggcggcgtgtggcctgccgggagatgtagtccgtagcgcagtcccgcgcctgcgccctgggcagttgccggtgagcttgggagaaccgtgggcgctgaggcggtgagtccccgagcggccagagggcgtggccgttccctggggcgcgggcgcgggtagcggggctcctttccgtggccggggccatgctaactgggtgattccagctgtgccccgggcggcgggcgccggaaggagtggtgggcggtgggcccctatccgg

SEQ ID NO: 44536 - DNA, 2300 bp, Homo sapien
ttgagttcatgctatgtgccaggtactgttctaagcattctacatatacttgtcagttaaccctcacccaaggttaggagctgggtactagtattatcccctggatacagatgagggaattgaggtttgaggcttagggggattgaacaacatgtctaaggtcacatggtaaatgccagagggaaatggtgattacgtcaaaatctatattctccagcaatcaaaaggtctaaaaacatcaaaatgttcttggtatagtctttgaggtcacagagacagtcacatacatgtttctacaggtctcaagacctgtatctgcccatgtgccttgggtcctctctctctgcatgtgctgagacagctgctgtagttgtcctcttctctggaggggattcaagggaaaaaaagtactcatgactctcttcctccccagtcaacctaaatcagcactctgtccttgtatccccctttaccatgatggtagcccgactttagcagatcggtttaggtataataacctgctagctgtgtgaccctgacacccagtgcctcttttgtaacagaagataatcatagcatctactttataaaatgttctgcatggatccaattgcatgcgaagcgaatagcagcatgcccggcacagaggaagcactcaattaaagtttattgcttgtcaggagtcattcctagggggcctctatttcccagagtctaggcacctaaccgttgctggagggcatccaggaactgtgctgtttttggctctggacccacccgttaatctgcgccagcctcacagctggtcagcccttccctgactgacccaaaaccttccaccacgtctaccagggaattgacccttcgggtttccttcgatggacccttcccagagaaacgttcatttcactgtgggaccagtgatttctctccaaaccttctcgtagggaatccaccctcatggggcctataagaaaagcgatgtgtgtaaagagagcacttgaggaacggcaagagtgacacgtccctaaaaagtgtaaaagctgattcaaattcggatgctagtgtctcgggcgcggcccctgttcgctcttgggcgacgaggccccgacgcctggaggggagctcccagcccagaaggactcccgggaaggcccggtcgggtcgcagggagtggtggcggggaccctggccggataggggcccaccgcccaccactccttccggcgcccgccgcccggggcacagctggaatcacccagttagcatggccccggccacggaaaggagccccgctacccgcgcccgcgccccagggaacggccacgccctctggccgctcggggactcaccgcctcagcgcccacggttctcccaagctcaccggcaactgcccagggcgcaggcgcgggactgcgctacggactacatctcccggcaggccacacgccgcccgccgggctgtgcgcccacagggatgctgacgtgggaggggctgggactcttcctggcttccaaccagcctcaagctgttttggaagggctcccgtttcctgtttaagcgcttcttagtcgcagggtgttgggtggggcgaaccccgggtcgtgatccaaatgagcgcttctccttgagccttggagtaactggagcgggtggggaccacctttaaatctgttacgacccggtcagtgattcttaaacctggctgtgtggggagaatttgtagggagagcttgttaaaaagtcgtatttcggggctccacccgctaccctgacgcattgaatctcacaggaacccggggattcgcattttaataaaccatcctggagattttgactccggtcgtccgcctgcagttcacagtggctttggatttgctttttagtatccccatcttcaagacctaagcttcgatctagcgaacccgcccattaccctctgccttcaacagccacggaggtctctggggttaaggtttgcctgcgggccccgcctcttgtctttcaattggtccctcgctggtcccgtcctggagccaaattttcttttctgattggtcagctgcgaattgtggctagacctgatccaatggccgcttgatacaatggtgtcgttcgggaaacgcagccctaacgttggtcctaagctgacaaattggtctgtggacgccaaacttccgtgctaggactttctgcgtgtggaccgggggcctagtcctgcgtgggtccaacacagacaggagaaagctgcctgcttttgtgcctcccggaggtcctggtagaagcgaaacggggacag

SEQ ID NO: 44537 - DNA, 2300 bp, Homo sapien
atattccttctagacttgattcagggttggcaaactttataaagagccaaatagtaaatattttaggcactgtggggcacattcactgtcagttcttctccttcctctttttttcaatgacctttcaacaagataaaaaaaccattacatacagagtatacagataaacagggtatggctagaattggccttcaggccatggagcaatttactgatgctttgggttgatgtatgtgggtagattatgttgtctatcaatttcatttgtgcatagtaaagtggacattataaactatttgttatagaaggggaattgagtctgatagagttaaaagcactgactcatttgctgagttcagcagaagagaaaaaggaagaggactctggagaaatcttgaggctggggaatgacatagagacaaatgtgtggtctagtcccagctgcctcagctacttcctttggaccaatcacaaagatcccacattcttttcttacctgctgctctggtatctcaagttctctctgtaagtcttctatcagtgacacaactctttctctattctctgggcagtgctccctcacccaggtctctatctctgtgggcaggatagttaggaattgctccaacactagcagctccaggatttgttccttagagcgcatctttggcttcagccattgacagcaaagctcccagagtttgttaaatgcttcatgaggcccagctgcttctctgtactggaactgcctgaagcgctgacggaaaacttcacagtcagtatcatattcttgaaacacagagccttgattcaaggatgcctggattgcacaacccagggccacagccatcgcccccttccagcagtttacagtttatctggagcctcacttctcagattccgacttgtttctctctgaaatcgttggggtgggagggagccacctacagctaaggacagaaaaaaatgagaaaggagaaacaggagtggtcacaagagggcttacttacctcggtcaacttcttttttaccaaagaacctgttaacttcttttttaccaaagacctaaagtagttctttatttttctcttggttttgagaatctgatgaaagcttcagactcacttcctagaaaaatacacatacacatccttttctgcatctagtttcaaaagtttataaaatctcaaagcctctagaattgcgcttgctgtccaatatggtagccaacagccccatgtgacactttaagtttagtcaaaaatttagtttctcagtaatattagctaaatttcaaatgcttaatagacttcactgcaaaaaggtctattggacagttctgctctagaattccatggtcccaggctaaggaccgtgaatttattaataaatgaacccttatagatctctttgcatttaacccattcccagtttaattccaattgtcatgtgtttctgaatatatgtagatctcaaaagaaatggcgaaggaatactaacaatacttccaaaaaactctgaaagtccatctagctttaagtatctcctaatggccttcgaccaaagtgaacttaggtagagccatggtttgcaaaggcagcaaattgtccatctctcattcttgtcctcaccgagtctgcgtaattcccccagtaaccccatgccattccttccccactcccctccaccatagcattccaagaggatctcctatgtgaaaaatacactgcaatagggaggccattaggaatttgctatgcattcacaacaacggatatttattgagttcatgctatgtgccaggtactgttctaagcattctacatatacttgtcagttaaccctcacccaaggttaggagctgggtactagtattatcccctggatacagatgagggaattgaggtttgaggcttagggggattgaacaacatgtctaaggtcacatggtaaatgccagagggaaatggtgattacgtcaaaatctatattctccagcaatcaaaaggtctaaaaacatcaaaatgttcttggtatagtctttgaggtcacagagacagtcacatacatgtttctacaggtctcaagacctgtatctgcccatgtgccttgggtcctctctctctgcatgtgctgagacagctgctgtagttgtcctcttctctggaggggattcaagggaaaaaaagtactcatgactctcttcctccccagtcaacctaaatcagcactctgtccttgtatccccctttaccatgatggtagcccgactttagcagatcggtttaggtataataacc

SEQ ID NO: 44538 - DNA, 2300 bp, Homo sapien
aagctggataaaaggcacaaggtcttttttggtactatttttgaaatttcctgtgagtctataattatttacaaacaaaatgttaaaaaataaatgagatgaggccaaggagaggtttcagaaatggctggaagcaacagggtctgcaaatgaatggggttctagccagtctggaacaatgggtttctatgtgccttaagtctatatttctatggccctttctttttcaaatattactaatttttttcattgtattatacaaggaatatgtacagacatacatttggacatacagacatatagagcgaagtaaaaagtttaagtctccctattgtcttaaccagaacaatatagagcaatttgatatatctgccctggctttttcttttttgtagtagaggcagtctcactccatcgtacagtggcaggatcatagcttacagtaacattgaactcctgggctcaagcgatcctcccacttcagcctcctgtgtagctgggactacaggcatatgctaccacaccccactaatatattttatttttttttgtagagacgaggaccttggtaaacaggcccagccttaagtgatcctcccatcttggcttcccaaaatgccgagattgcacgcctataatcccagcaatttgggaggccgaggtaagcggataacctgagatcaggagttccagatcagcttggccaacatggtgaaccctatctctattaaaaatactaaaaatacaaaaattagccaggcgtggtgtcgcgtgcctgtagtcccagctacttaggaggctgaggcaagagaatcgcttgaacctgggaggcagagacagcagtgagctgagatcatcagcgtggaagacagagtgagacttagtctcaaaaaaaaaaaaaaagaaaagaaaaaaaaagaaaaaaaagaatagaaaagagaaaaagaaagaaaagaaaaaccacgcccagcctcctgccctggcatttttttttttgatgcatgtatacccatgcatggatgtgttgcgttgttgataaaatcgtgatgtccacacaataaccagaatccagtgattctggaactggattttttttttcttgatcatgtaggtaggacaattgctcaatcagtgtaaatggatccgctgcgttcctcagttacgtgggataccatagagatgatcaggcgtgacggtgaacaggtattttgagagttcttaaatacccacgtcaacctttgttgtgaaaactgggatggggttgggtgaacctacttctttcttgccgacagtttttcaaaagtcatgaccataacgaagtgagagcatttccccacatcattaaaacagtctgaaaaaacgctactgggttttgactggtttacgtttaataaagattgaatgaaaccacgaaagggcttttaagcacactggcaacaaacaaacaaaaaggccataaacaagagcaaatgaaaacccaagacgaccttgtgcaaccaccatggcaaacaatggattaagaagagtgcttagaaagggaaggacaatggggaaattcgccaataaagagatatacgtgaccagcaaatataccagaaagggaaaaatgcacgcatgtgggcttgatggcactctgtagcgcagttactgcaccatgcgaattaaagaaagatataatggcttggctggccagttttcaggggagaccgtgggagaagggaggtgatatgaacaggcagaggcttctgcacgtgctttctatacagaatcagcgtagcggcccagattgtcctcctccactgccgctccaccctgggaaatggtctcaaagcgatccctggcagctccgcccttcaatccactccagcctccggaggcgcccggaaagaggcggggctgtgtgggcgggacggggcagtgggcggagctgagcctgcggggcacgtcgagcaggcggggtcgcagcgctgacggcctctctgcggctcccggttgggggcgtggctaagccagcggcggacctatgctggcctgggggggttcggggtgggggttcgggggggtggccccccgcagtgaggaggtgtggagggggcggcgtgtgcgggatcgtggaggtggggccgaggcagcggccgcctgagccccgctcggccttgggaacacgggggcggggcggccgcggctctgggcgacccgctgggtgcactagtgctcgggtcccaccgccctgaggctcgcgctcgagcgggtcagtcggtcggcggggcctgcgcggggcccgggcccatggcggcgtc

SEQ ID NO: 44539 - DNA, 2300 bp, Homo sapien
gtagagaacccaggtaaacttagacctctgactcatggaaactgtgagatagtaaatgcttgtgttgttttaagccactaaatttgtaataatttgttaaacagcagtagaaaactaacacactgcccccaacagtcctatattttttgtaccctagcccatgtaggcattgcccttctacactgacatttgtatcggaatggaaatgggggcttctagtatctttttcatccttatttcttcattaattccctactttccaccagaatggcctgaaatgcaccatacatagtactatctttggctgagtttttgttcatatcattccttccaacccagattccctctcttccctttttgtgccttgttcgtgaaatcctatgaatttctagactggaccattgtttccatagcactttttaacttgcatccttgtttgtccctgattcatatactgccatatgacttcttttaaaatcgtatttctctgagaatgttattgaatgtgcatatataatatatgaaacatatacacagaacatacatatatatatagagagagagagagagagagagagtgtatataaaatatataaaatacttttttgagatgttatctcattctgttgcccaggctggagtgcagtggtgtgatctcagttcactgcaacctccgtctcctgggttgaagtgattctcctgcctcagcctcccaagtagctgggactacaggcgcctgctcccatgcccggctaatttttgtatttttagtagagacgggggtttcaccatgttggccaggctggtctcaaactcctgccctcaaatgatccacccacctcggcctcccaaagtgctggaattacaggcatgagccactgcgcctggccaaaatatataaaatattatgtatgtatatgtcatcatctctcctcaatgaaactgcaaactcattgaagtcctggattccacattgtcaatagtaattgccaggaatacacaagtccaatttttaaaattgtgtcatatgaagtagtcaatcaagtgtggttggccacttactgagtctcttcacagagccagacctgagagtatccgtaattgttaccctaacctcagggagctgcattttcctctactgaaaattgaatacaatgccatctgccataattaattcaaagattaaacaaggctaccgtgggtgcctggctcttcataggcactcaataaatgtgagttgagagcctgcccctgtggtcccagctacttgagaggctgagatgggaggatcgcttaagcccaggagctggacgctgcaggcagctatgatggggccactgcactccagcctgggcgatcaagcgagatcctctttatttatttataaaaataaataaataaataaatatgtgagttgaatcacaatctaggtttgcaaacctccatgtgtaaaggctgcgcagagggaacagtggtggaattatcacaggcaggccaatgtttcaaagagcttagtgaaactgaagaagcttgtgcatacaaaaggccagtttaggtaactgtaactgtgtttaagctttagtttcctttctaagtagatatatgtggaatgcaaggccagcaaccaactcacaaatactgatcaagacgggggagggatctaaaggaatgtgagtacgtcctgccaggaaagaagtttgctgcttctgaaatattttcgtcttcgccactggcaggattgatcgattgcagttagcgaagaattttctgtgcaaactgtccaagcatctgcttctgtacttctgtacaactgttgctcaaattcactcttcttttcgaatcaccatctttgaagagagacagaaaaatccatttaaaccacccgaactaatcattcgaactgcttccaagtcctttaaaggagaatcctagcgagggtccgtaacacttccccttaccctctgcctgggttcaaacttcaactcccagggttcgcccaagtccctcccctagtcctgtcatctaatgaatatgcaaataccacataattggcagccaatggcatgggttctggtcacatggtgccgatggtaggtgagcagacagaagttgtcagtgaacagagacggcgctcagtctggggcgagcgctctagtgagcgcggacggatgcttaggcagtagtcctggcagcggcagtagtggtggcagcagaagagaggaagggggagggccccgagggctacacacgctcacactttcaagttcccttggagggagaggaggtggggctgcagaaag

SEQ ID NO: 44540 - DNA, 2300 bp, Homo sapien
gaaaataccggtcatttttgaggtgctggcagtatcattttactttcattctacactctcatcatatcttctttcaaatgttgatcagctaattgtttatgtgacacctttactgtaccatcctagagagtccatgtgaatgggtatttaatgccatggaaataatttgctgagctacagaggtagtgactaaggcagtgtcaccccaggagctctctactcttaatctagactgcagaagattttctttcttctcctgactcccattttaaaactctggcagaaaataattagcctaaatgagctccttggtggaatcattgcacttggcattgttagaaatgcaaagagtattattcacttgattatctaatctatttatatctaaaagtttctccagtatttacgtttgtccgttagtttccaaaatctgcctaattcccaacagacacaacataaagacatggtataacaggatatatccatggtctctcattcctttctgtcaagatatgaatggtctttaaaggccccacttgctgcaatgaaccagaaatatcttcaaatctttaacaaaagacctacattttatgactttgtaaattcatttaaatttgtttcagcaggagtgaataatttattatagctgtaaaaggaaggaaatatgtagtcgcttttcttaactaaagtaattcagattttcaaagaatagccctatttgtaaagaaattatgcatgtgggatagggatggttttgtctctgtaagtaaagcattttttttaaaaaaatcaaaactactaaaaccttaagacacaaaataaaggatgaatttatagtgtctttggtacctatagtatgtgtggcagattcatgttgatgtctggggattccaatttttatatttttattgtattagaaaaatgtttttttcttacacttggaaggaaataatgagatgtgaaggaaattttcatgcgtatataaaatgtatttagattattaaaataattaaatttaagtgtgaaaagatagggaatgtctacttaggtaaatatttttagttcaaatatttttagtacatggtattcaagaaacatgtttagttgttctacagaattttaaacttcaacctaacatctgtacttacttctactagtgcttttactatcacccaatgactttaggtcagtgagtgacctaaagtttggctcaaaatgtgtgatcatggaaataaaaaaaaaatgcagaggcagggaaatatggctaaacaaagcataggctgattaaaatttttattttattattttattttattttattatgtttttttgagacacagtcttgctctgtcacccaggctggagtgcagtggtacgatcacagctcactgcagcctcaacctcccaggctcaagcaatcctcctgcctcaacctccccagctacaggcatatgccatcatacctggctaatttttgtttattttttttatagagacaggggtctcattatgttgcccaggctggtctcaaacttctgggctcaagtgattcatccatctgagcctcccaaagtgttggaattacaggtgtgagccactgcgcctggcccaaaatatagttttagagcttgctcatcactgcctagaaattataggcttagcttttgtttgtatatactttgtaaagtctcttaccttgacctttcagcaaaatggataacaccctctatgtttaaatgaaataaatgttattccatcaaccagtgaccatggattgcccctgaggtgaaaattactagttaccaatatgtaagaggttgggaaaatatttcaagtggatcaaaatcattgttttaatattgtatttcatgtagcattgcagatgaaagaggaatatgtaacttaagaatttatttcattttttagaaaaaatactatatataattttggtaaatagtacaaccactaaaaaagataatcaaataaacgccaatgaaattttcatctacattaaaagctgaagtttctagatgtgggttgcttgattatatcttagagctcaggactagaatgatgtaatattttatttttctattacagatgacttgtttaaagttcacaagcttaagccaaatctgaagtggcgacaggcttttgacagctacttaaaaactctgcctccatactacctattagtatgtatttgtgtgtatatatgtattaactgtatcaatgataattcttgtcacaagaaatgttagtgatcaaaagcttttactgttgcaataagagagatatct

SEQ ID NO: 44541 - DNA, 2300 bp, Homo sapien
aacatagacttaattccaataattagggaaaattgataaatatctgtcaccaaaccacaagaaatccaaaatcattttaggtttaccaaacattggtggaattccatctttctgagaaaaagggaagatcatagctaatttataatagctcaaattactaatttaataactgggtcaccagtgtttcttgagccatttcagatgtatgtaaaacacaaaatatgccaaatatatattgctataatacactcaagcagtattaatcaatatggtatcacaatgcctattaagaggctttttacaaattacttacttagtaatatctgttaaattaagcattatcttctaagaccttttttggatagtcaaatataagagataaatagtttaattttttcagaccttttttggatagtccaatattagagataaatagtttaattttttcagatataatgccagtcgatgtgatctgaattttagtactagtttacacgtataaatacagtcttaaacctttatgtctgagtctgaaatgaacctgttcacttagactagattttatagtaacaaaatgtgcttttaaatgtctatgaatgaaattcttattcatggtttttattctctccatgattttattataattttgacactagacaagaaaaaaaaatattatttgtctttcctgccccctatctgtttgctgtgatagtgcaaagaagcacaggaaaatgtttaattatccatttttctgtgatttgtaattgaaaattgttctgtggggttctgaaagtattatctttcttaagtagtaaaaatgacagtggtaatgtagatgtttttataacatactatgtactttcattttagaccaaactagagtcagaacgaatactagcatcagtggggaagaaacctccccaggaaattggaattaaagtgaaaaatcattctggaggtggcatgtccttgactcacaataaaaattttagaaaactattgaaagaaatcacaggggaaactgcacttagactgacagaattgaacaccaaagaatttgctggcttccaaattgggctcttaaacaaggtaaattgtgacataaatagtttgtatttgtttgaacttgtctgatacatttatgtctttcatattcctttagttttgaaataatggacaatcctattttggagttagtagttaataatggaccagtttaggaattgtcagcagatatcaatatggaattaaatggacaagatatgttttgtgggtaacgcccatgaaagataaaggggagatgaagctggagtaggcaggcagagcttccaagctacaaagctggcccatcacctgtgagaggaaggaggaatgaaggagaattgggtgtgaagaagctcagacactggtgtagcttggagaaagtcttggccagcacagtggggacctctagcaccaagatttcctacagaggagggccacactgggcagagctggccaggccctaacaccctgccattgtctgttactggctatgggcagcctgggaagggcatggcctcagctcagtgctgcagcggatccctatggcaccacagcagcgggaggctctctgctaactgcactccttgcaggatcagccattgctttcctgaagggagatcccagcagctcacctcccctccatggctgccagaggaatacatctagagtacgagcagtggtcctgcaaggcggccacaggtatcaatctcgggatttggtgttttaaatgacatatttgaaaagggatagtcccagtggctttaataccctgtaggtgtgttacaatgcagaacaaggctagcaagtggaattttgccactgggaaaattctactgtagtcagttgtattgatataacactcttcaataacattttaagagagataagtatgacatttctatattaaaagccttaggagtaactgaaattatttgtttcatttcaaataggatttgaaacctcagacatacagaaatgcttatgatattccccgtagaggtcttttagaccagctgaccagaatgagatccaatctgctgaaaacgcacaagtttattgttggacaagatgaaggtaaaataactgtgaaatactttttttttttttttggaaaatgccaggcatgacttacaggaaggtgtttattgcataatgagtaggctattttatagtattttaatgtttaaaatgcctgttttcactgaatccctatgtctgtttaccaggcacattttttttttcaagtttaaggtcaa

SEQ ID NO: 44542 - DNA, 2300 bp, Homo sapien
gtgttggttgaataaagtcagagctgccatgtattgagtactagtaggagctggtgttttaaatgatctcacttaatgctcacaactgttctgtaagacaaatgttactgtttgtcctttaaaagggagaaatcaaaggccacagtggtcaaacgccttacctgtgacatagcacataagagcaaggatttgaatccacgtctttctcactccagaatctatattcattccaccacacactaatttctttaatatcgaaatcacagtttatttcctgtttccatgattcatatctgtagtgcttgatctagaaaacgatgaatgtgtcccttgaaatatgaagtactaagtgatgttgttttacttgaatggtcctactaaaaatctaaatgtggggagtgtgtgtgtgtgtgtgtgtgtgtatgtgtgtgtgtgtgtgttatactgacttgcccattaaagcatgaaaacaaatgggattatagctgcactcatggaggagaccattggtgttaattaaggctcagaccacacaataatctcttttgtgacaagactgattgaaaggtattccacgtcacctaaatcctcaatttatctttctatgcttcactttcctcattttgtagcactggggataataattacacctaactatgctggacgaggtggctcacgcctgtaatcccagcacactgggaggccgaggcaggcaaatcacttgaggttgggagtttgagaccagcctggccaacatggcaaaaccctgtctctactaaaaatacaaaaattagccaggcgtggtggtgggtgcctgtaatcccagctactctggaagtcttaggcaggagaatcacttgaacctgggaggcggagattgcagtgaaccaagatcgtaccactgcgctccagcctgggtgacagagtgagactccatctcaaaaaaaaaaaaaaaaaattacacctaattaactaatagaactctgcataatattaagtgagtacatgcacattgtttacaacatgaacaggcatgtagtaaattatctgaaaatgttttcccctttctgtattgtttatgagtaaaaaatcttttggaaaagccatttattattattttattcaactaatgagggcacatattcttggattattcctggacaagaacagctcttggctaaatttctatactgctgcctctcatcttttatctatccccccaagagtgaaaagcctcctcactgcctgcccagcaccaaagtgggcatatttgaatctctgtgaggctgcagatggggaggtgcattttccacctgcctgcctttcaacacgtacatgtagcatactgtacagtgataatcaatgttgtttaatgatatgagtttggagcataaaaaaggaaattatttcccttatgaagagttgatgcaaaatagttcgtacttctctccttttggttgaataatgctgcttatttgcaaactttctgattaatcattattgtagtatgttttgcttgggacaacatcctgtatgttagtttcctccttgttccatttaaattggattaaaattgagttgcatatttctaagaacaaagttggggtggggtaagataaatcttcggcccatgattaaggtttatattagttaatctggcatgggatttaaaaaaatgaaagaaaaaaagacatattcgtgatataatgcaagattgattatgtatgcatattaagagtgcttgcagttatataatagtggaattttggtctttaatgaaatacgttcatttatgtgttttttagggaatgatgattgatgaagcagatgagtttgtagcagggccacaaaacaaagtgaaacgtccaggggaacccaacagtcctatgtcatctaagagaaggcggagtatgtccctgctgttgaggaaaccacaaacaccacctactgtaactaaccatgtgggcggaaagggaccaccctcagcctcgtggttcccatcttatccaaacctcataaaacccacccttgtacatacaggtatagagtagtggttgtgatttccttatggctcctagaggactaagacgctaaacaattttatttccctttttgtgttccttcctttgtgttcagtttgtgttcattaagtaagccattactaaatcatctatttggtaggtacaataaaccccacagggagcagagaccctgtttcaaggatctcaatctacatgaggtgaaaaaaattataattatatagtaattaacacacagtaattaacagtaatgaatacatt

SEQ ID NO: 44543 - DNA, 2300 bp, Homo sapien
agctataatactgaaaatgactctcttctgacagggtacttaacaaacataatttttaattttaattttaatttatttattttaagacggagtctccctttgtcgcccaggctggagtgcagtggctcgatctctgctcactgaagcttgtgcctcccaggttcaagtgattctcctgcctctgcctcccgagtagctgggattgcaggtgcccaccaccatgcctggctatatttttaattttttttttacaaacataacttttgaattacaaaaccagtgaagtaatcccttccaaataattgtgtcaagagtgaaactgcttgttccattaaaactccaaaactttcgctgtaatattttttgccactatgaacaattcaagtaaattttgctgcgcttaaaataagttatgaaagtggaaaaatgggcggggcgtggtggctcacacctgtaatcccagcacttttggaggccaaggaagacgaatcacttgaagtcaggagtttgagaccagcctggccgatgtggtgaaacactgtctctactaaaaatacaaaaattagccgggcatggtggtgcatgcctgtaatcccaacttctggggaggctgaggcaggagaatcacttgaacctgggaggcggaggttgcagtgagccgagattatggcactgcactccagcctaggtgacagagccagactctgtctcaaaaaaaataaaaaaggtggaaaaatatacaaagttccagattaaaatgattaatagatgcaatataataaggtttcccctcctttctttttttctttcttttttttttttttttttttttttttttagacagtctcactttgtcacccaggctatgcgatcaaagctcaatgcagcctcaaactcctagtgtcaagcctcctggtctcaagcctcccaagtagctgggaccacaagtacactttcagctaatttttgtatcttgtgtacagacggggtttcaccatgctgcccaggccactcttgaactcttgggctcaaggaatctacccaccttggcctcccaaagtgctggggtacaggcatgagccaccacactgtggccctcatttttcttatcaattaacaactgttacctttaacagatagaggttgaatttatatttatttatttatttatttatatttttagacagagtctcgctctgttacccaggctggagtgcagtggtgtgatctcagctcactgcaacctcacttccccagttcaagtgattctcctgcctcagcctcccaagtagctgttgggactacaggtgcgcgccccacgcccggttaattttctgtatttttagttgagacgagattcaccatgttggccaggctggtcccgaactcctgacctcaggtggtccagctgctttggcctcccaaagtgctgagattacaggcgcgagccacagcgcccgttggggttgactttaaaacacaaccccatccaatgaagatttcagtttgttgatgttgtcgtttctttctttctttcttctttctttctttcttttcttttcttttctttttttctttctttctttctttctttctttctttctttcttttctttctccttccttccttccttccttccttcctctctctctctctctctctttctttctttctttctttctttcttctttccttttttttttttgagatagagtctcctctatggccaggctggagtacggtggtgcgttctcggctctctgctacctctgcctcctgggttccagcgatcctcccacctcaacttcccgagtagttgggaccacaggcgcccgccaccatgcccagctaatttttgtgtgtgttttttttttttttggttggttggttgctctgtagagccggggtctcactatgttacccaggcgatttcatcccactgtgtgagaaggttctgcgttcctctgcttatgttgctgtgcagttgttactgaaggtcgcctgtagagggcgccagtcagcgaaggggagggctgcgcttcctggttctctggggcacgaggcttctcctcagcactctggcgcccccaacaggttcccagtgttcggctggggcaggcacgctgtggctggctgcttcccttccttccatcccctttggaccaaacgggatcggtgcttctggtgagacgcctccccatgcacatcactcccaggtgccctagggggcacatttcccacaactcccagagggcaggtttctagaaagtgccaccagtggggaggcgccacaacttcac

SEQ ID NO: 44544 - DNA, 2300 bp, Homo sapien
ttttaattaattaatttattttgagacggactctccctttgtcccccagtgacaatggatctctgcccctttggagtgcagtgacgcgatctctgctcactgaagcttgcacctctcaggttcaagtgattctcctgcctctgctgccctagtagcagggagtacaggtgcccaccaccatgcctggctatattttttaattttaattttaagttttttacaaacataacttttgaattacaaaaccagtgaagtaatcccttccaaataattgtgtcaatagtgaaactgcctgttccattaaaactcgaaaaatttcgctgtaatattttttaccactatggacaattcaagtaaattttgctgcacttaaaataagttgtgaaagtagaaaaatgggccgggcatggtggctctcccctgtaatcccaggactttgggaggccaaggcagatgaatcacttaaagtcaggagtttgagaccagcctggagaacattgtgaaacaccgtctctgctaaaaatacaaataccagccgggcatggtggtacatgcctgtaatcccagcttctcgggaggctgaggaaggagaactgcttgaacctgggaggcggaggttgcagtgagccaagatcatgccactgcactccagcctgggtgacagagccagactgtctcaaaaaaaataaaaaaggtggaaaaatatacaaagttccagattaaaatgattaatagatgcaatataataaggtttcccctccttccatcctttctttctttctctctttctttcttcctttcttcccttctttcttccatccttcctttcttcctttcttcccttctttcttccatccttcctttcttccttcctttctttctttcgttctttctttccttccttccttcttttttctttctctttctttctttctttctctctttctttctttctttttttttgtagacagtcttactctgtcacccaggctatagtgcaatggtgcgaacaaaggtcaatgcagcctcaacctcctggtgtcaagcctcccgagcagctgggaccacagttacacgctcagctaatttttgtattttgtgttaagatggggtttcaccatgctgcccaggctgctcttgaactcctgggctcaaggaatccacccctcttggtctcccaaattgctgggattacagacgtgagcgaccgcactggggccctcatttttcttatcaattaacaataatggttacctttaacagatagaggttgactttatttattgattgattgatttttatttttagacagagtctcactctgttacccaggctggagtgcagtggcatgatctcagctcactgcaaattctgcctgcccggttcaagcgattctccagcctcagcctcccaagtagctggtgggattataggtgcatgccaccacgcccggtaattttctgtatttttagcagagacgggattcaccatgttggtcagacagactggtctcgaactcctgacctcaggtggtccagccccttcggcctcccaaagtgttgagattacaggcgtgagccactgtggcgggtcggggttgactttaaaacacaaccccctcaaatgaaaattgcagtttgttgttgttctttttctttttcttttcttttccttctttctttctttctttttttttttttttctgaggtggggtctcctctaccgcctgggctggagtgcagtggctcactgctacctccacctcccgggttcaagccatcctcccacctcaacttcccgagtagttgggaccacaggtgcgaggccactaggcccagctaatttgtgtgtttctttctttctttctttcttttttgattagttggttgctttgtagagccggggtctcactatgttacccaggcgatttcatcccgctgggtgagaaggttctgcattcctacgcatacgttgctgtgcagttggtactgaaggtcgcctgtagagggcgccagagtcagcgaaggggagggctgcgcttcctggttctctggggcacgaggcttctcctcagcactctggcgcccccaacaggttcccagtgttcggctggggcaggcacgctgtggctggctacttcccttcctcccatcccccttgggccaaacgggatcggtgcttctggtgagacgcctccccatgcacatcactcccaggtgccctagggggcacatttcccacaactcccagagggcaggtttctagaaagtgccaccagtggggaggcgccacaacttcac

SEQ ID NO: 44545 - DNA, 2300 bp, Homo sapien
attttaattaattaatttattttgagacggactctccctttgtcccccagtgacaatggatctctgcccctttggagtgcagtgacgcgatctctgctcactgaagcttgcacctctcaggttcaagtgattctcctgcctctgctgccctagtagcagggagtacaggtgcccaccaccatgcctggctatattttttaattttaattttaagttttttacaaacataacttttgaattacaaaaccagtgaagtaatcccttccaaataattgtgtcaatagtgaaactgcctgttccattaaaactcgaaaaatttcgctgtaatattttttaccactatggacaattcaagtaaattttgctgcacttaaaataagttgtgaaagtagaaaaatgggccgggcatggtggctctcccctgtaatcccaggactttgggaggccaaggcagatgaatcacttaaagtcaggagtttgagaccagcctggagaacattgtgaaacaccgtctctgctaaaaatacaaataccagccgggcatggtggtacatgcctgtaatcccagcttctcgggaggctgaggaaggagaactgcttgaacctgggaggcggaggttgcagtgagccaagatcatgccactgcactccagcctgggtgacagagccagactgtctcaaaaaaaataaaaaaggtggaaaaatatacaaagttccagattaaaatgattaatagatgcaatataataaggtttcccctccttccatcctttctttctttctctctttctttcttcctttcttcccttctttcttccatccttcctttcttcctttcttcccttctttcttccatccttcctttcttccttcctttctttctttcgttctttctttccttccttccttcttttttctttctctttctttctttctttctctctttctttctttctttttttttgtagacagtcttactctgtcacccaggctatagtgcaatggtgcgaacaaaggtcaatgcagcctcaacctcctggtgtcaagcctcccgagcagctgggaccacagttacacgctcagctaatttttgtattttgtgttaagatggggtttcaccatgctgcccaggctgctcttgaactcctgggctcaaggaatccacccctcttggtctcccaaattgctgggattacagacgtgagcgaccgcactggggccctcatttttcttatcaattaacaataatggttacctttaacagatagaggttgactttatttattgattgattgatttttatttttagacagagtctcactctgttacccaggctggagtgcagtggcatgatctcagctcactgcaaattctgcctgcccggttcaagcgattctccagcctcagcctcccaagtagctggtgggattataggtgcatgccaccacgcccggtaattttctgtatttttagcagagacgggattcaccatgttggtcagacagactggtctcgaactcctgacctcaggtggtccagccccttcggcctcccaaagtgttgagattacaggcgtgagccactgtggcgggtcggggttgactttaaaacacaaccccctcaaatgaaaattgcagtttgttgttgttctttttctttttcttttcttttccttctttctttcttttttttttttttttttctgagatggggtctcctctaccgcctgggctggagtgcagtggctcactgctacctccacctcccgggttcaagccatcctcccacctcaacttcccgagtagttgggaccacaggtgcgaggccactaggcccagctaatttgtgtgtttctttctttctttctttcttttttgattagttggttgctttgtagagccggggtctcactatgttacccaggcgatttcatcccgctgggtgagaaggttctgcattcctccgcatacgttgctgtgcagttgttactgaaggtcgcctgtagagggcgccagagtcagcgaaggggagggctgcgcttcctggttctctggggcacgaggcttctcctcagcactctggcgcccccaacaggttcccagtgttcggctggggcaggcacgctgtggctggctacttcccttcctcccatcccccttgggccaaacgggatcggtgcttctggtgagacgcctccccatgcacatcactcccaggtgccctagggggcacatttcccacaactcccagagggcaggtttctagaaagtgccaccagtggggaggcgccacaacttcac

SEQ ID NO: 44546 - DNA, 2300 bp, Homo sapien
ttttaattaattaatttattttgagacggactctccctttgtcccccagtgacaatggatctctgcccctttggagtgcagtgacgcgatctctgctcactgaagcttgcacctctcaggttcaagtgattctcctgcctctgctgccctagtagcagggagtacaggtgcccaccaccatgcctggctatattttttaattttaattttaagttttttacaaacataacttttgaattacaaaaccagtgaagtaatcccttccaaataattgtgtcaatagtgaaactgcctgttccattaaaactcgaaaaatttcgctgtaatattttttaccactatggacaattcaagtaaattttgctgcacttaaaataagttgtgaaagtagaaaaatgggccgggcatggtggctctcccctgtaatcccaggactttgggaggccaaggcagatgaatcacttaaagtcaggagtttgagaccagcctggagaacattgtgaaacaccgtctctgctaaaaatacaaataccagccgggcatggtggtacatgcctgtaatcccagcttctcgggaggctgaggaaggagaactgcttgaacctgggaggcggaggttgcagtgagccaagatcatgccactgcactccagcctgggtgacagagccagactgtctcaaaaaaaataaaaaaggtggaaaaatatacaaagttccagattaaaatgattaatagatgcaatataataaggtttcccctccttccatcctttctttctttctctctttctttcttcctttcttcccttctttcttccatccttcctttcttcctttcttcccttctttcttccatccttcctttcttccttcctttctttctttcgttctttctttccttccttccttcttttttctttctctttctttctttctttctctctttctttctttctttttttttgtagacagtcttactctgtcacccaggctatagtgcaatggtgcgaacaaaggtcaatgcagcctcaacctcctggtgtcaagcctcccgagcagctgggaccacagttacacgctcagctaatttttgtattttgtgttaagatggggtttcaccatgctgcccaggctgctcttgaactcctgggctcaaggaatccacccctcttggtctcccaaattgctgggattacagacgtgagcgaccgcactggggccctcatttttcttatcaattaacaataatggttacctttaacagatagaggttgactttatttattgattgattgatttttatttttagacagagtctcactctgttacccaggctggagtgcagtggcatgatctcagctcactgcaaattctgcctgtccggttcaagcgattctccagcctcagcctcccaagtagctggtgggattataggtgcatgccaccacgcccggtaattttctgtatttttagtagagacgggattcaccatgttggtcagacagactggtctcgaactcctgacctcaggtggtccagccccttcggcctcccaaagtgttgagattacaggcgtgagccactgtggcgggtcggggttgactttaaaacacaaccccctcaaatgaaaattgcagtttgttgttgttctttttctttttcttttcttttccttctttctttctttctttttttttttttttctgaggtggggtctcctctaccgcctgggctggagtgcagtggctcactgctacctccacctcccgggttcaagccatcctcccacctcaacttcccgagtagttgggaccacaggtgcgaggccactaggcccagctaatttgtgtgtttctttctttctttctttcttttttgattagttggttgctttgtagagccggggtctcactatgttacccaggcgatttcatcccgctgggtgagaaggttctgcattcctacgcatacgttgctgtgcagttggtactgaaggtcgcctgtagagggcgccagagtcagcgaaggggagggctgcgcttcctggttctctggggcacgaggcttctcctcagcactctggcgcccccaacaggttcccagtgttcggctggggcaggcacgctgtggctggctacttcccttcctcccatcccccttgggccaaacgggatcggtgcttctggtgagacgcctccccatgcacatcactcccaggtgccctagggggcacatttcccacaactcccagagggcaggtttctagaaagtgccaccagtggggaggcgccacaacttcac

SEQ ID NO: 44547 - DNA, 2300 bp, Homo sapien
ttaattttaattaattaatttattttgagacggactctccctttgtcccccagtgacaatggatctctgcccctttggagtgcagtgacgcgatctctgctcactgaagcttgcacctctcaggttcaagtgattctcctgcctctgctgccctagtagcagggagtacaggtgcccaccaccatgcctggctatattttttaattttaattttaagttttttacaaacataacttttgaattacaaaaccagtgaagtaatcccttccaaataattgtgtcaatagtgaaactgcctgttccattaaaactcgaaaaatttcgctgtaatattttttaccactatggacaattcaagtaaattttgctgcacttaaaataagttgtgaaagtagaaaaatgggccgggcatggtggctctcccctgtaatcccaggactttgggaggccaaggcagatgaatcacttaaagtcaggagtttgagaccagcctggagaacattgtgaaacaccgtctctgctaaaaatacaaataccagccgggcatggtggtacatgcctgtaatcccagcttcttgggaggctgaggaaggagaactgcttgaacctgggaggcggaggttgcagtgagccaagatcatgccactgcactccagcctgggtgacagagccagactgtctcaaaaaaaataaaaaaggtggaaaaatatacaaagttccagattaaaatgattaatagatgcaatataataaggtttcccctccttccatcctttctttctttctctctttctttcttcctttcttcccttctttcttccatccttcctttcttcctttcttcccttctttcttccatccttcctttcttccttcctttctttctttcgttctttctttccttccttccttcttttttctttctctttctttctttctttctctctttctttctttctttttttttgtagacagtcttactctgtcacccaggctatagtgcaatggtgcgaacaaaggtcaatgcagcctcaacctcctggtgtcaagcctcccgagcagctgggaccacagttacacgctcagctaatttttgtattttgtgttaagatggggtttcaccatgctgcccaggctgctcttgaactcctgggctcaaggaatccacccctcttggtctcccaaattgctgggattacagacgtgagcgaccgcactggggccctcatttttcttatcaattaacaataatggttacctttaacagatagaggttgactttatttattgattgattgatttttatttttagacagagtctcactctgttacccaggctggagtgcagtggcatgatctcagctcactgcaaattctgcctgcccggttcaagcgattctccagcctcagcctcccaagtagctggtgggattataggtgcatgccaccacgcccggtaattttctgtatttttagcagagacgggattcaccatgttggtcagacagactggtctcgaactcctgacctcaggtggtccagccccttcggcctcccaaagtgttgagattacaggcgtgagccactgtggcgggtcggggttgactttaaaacacaaccccctcaaatgaaaattgcagtttgttgttgttctttttctttttcttttcttttccttctttctttctttttttttttttttctgagatggggtctcctctaccgcctgggctggagtgcagtggctcactgctacctccacctcccgggttcaagccatcctcccacctcaacttcccgagtagttgggaccacaggtgcgaggccactaggcccagctaatttgtgtgtttctttctttctttctttcttttttgattagttggttgctttgtagagccggggtctcactatgttacccaggcgatttcatcccgctgggtgagaaggttctgcattcctccgcatacgttgctgtgcagttgttactgaaggtcgcctgtagagggcgccagagtcagcgaaggggagggctgcgcttcctggttctctggggcacgaggcttctcctcagcactctggcgcccccaacaggttcccagtgttcggctggggcaggcacgctgtggctggctacttcccttcctcccatcccccttgggccaaacgggatcggtgcttctggtgagacgcctccccatgcacatcactcccaggtgccctagggggcacatttcccacaactcccagagggcaggtttctagaaagtgccaccagtggggaggcgccacaacttcac

SEQ ID NO: 44548 - DNA, 2300 bp, Homo sapien
cttggcctattctaaagctgtaaagctaatatcttatattttttactggattcactatctatctttaataatgttttctgcagtgggatggggtaagaatcaaagtttgtattttccctgcatttatgaagtgcatttattaaaagcactagtctttccacaatgatttacaggagctctcctgtggtaaatctagctattttccatttccagattgtttctggcctctgtgtcctctgcccttggtgtatttacctgtcattgctccaataccacacggttttaattactctacctttatagtaaatctcatatttagtagtgtgtatttaccaacttagttctttttcttaaagattgtcttagctttaccaaaccttcgatttgcacatacttaaaacaattatctgtttgtcaattttcagaaaaaattttgttaacacggtggaattttaaatgattggtatgttcattctgagagaattaacaataatgtctcttaataatgtcttccattccatggaaggtaaaccaaagtgccaataaaggcacgcctttttatcaagcaattcaagtcaagtcaaaatcaaaactaaaattatcaagcaattcaagtcaagtcaaaaacaaaaaccaaagggctggtacaggtacaccgtgggtgatctggccatgcttccactcaaatggagtcggcaagttccaaagaccagtcttaccaagttttagatgtccagacttaaagtgccagttccttcctggtgttcagccactgcgttgatcctccgcgggggcctgctgtgcactgctctgacaaggcgttccacaggggcaaatgcctaccccggagcgctctcaggatctgcatcgctcaagctggccagagttcccagcagggatgctctacagggcaggcatgagctgcctaaggggctgcctcgactgtccgttaatcaggaaaccaagaaatgtagcaggatgagccgcagacaaaactcctcaggcactggattaaagaaggaagtggtttattcggctgggagcatcagccaacttgcatcataagagctgagttccccgaaaaagaaattcttggcctttttagaggcttacaactttaaggggtccacgtgaaagagtcgtgataaattgagcaagtgtgggaaatgtgactgggggctacatgcagcagctaacagaacaataagttttacaatgctttttttcatacagtgtctggaatttagagataacacaagtagtttaggtcaggggttgaaattattatcactttttttaactcctagggccgggtggtggtgccaaggttgtctggctatttattttactttttttttttccaactttttgctttctttctttcctcctgtcttgtgaactaggcaaggtagggggaggagggcagcaggagtagtagtggtctccttccttagcgggactacaggtgcgtgccaccacacctggctaattttctgtatttttagtagagacgggattcaccatgttggccatgctggtcttggactcctgacctcaggtgatccagacacttcggcctcccaaggtgctgacattacaggcgtgagccactgcgcccggtcggggttgactttaaaaaacaaccccctcaaatgaaaatttcagtttgttgttgttgttgcttctttttctttctttcttttttttttgatggagtcttctgtatggtctgggatggagagtgcactggcacgatcttggctcactgctacctccacctcccgggttcaagcgatcctcccacctcaacttcccgagtagttgggaccacaggtacacgccaccatgcccagctaatttttgtgtgtgtttttttggttggttggttgctctgtagagccggggtctcactatgttacccaggcgatttcatcccgctgggtgagaaggttctgcattcctctgcttatgttgctgtgcagttgttactgaaggtcgcctgcagagggcgccagagtcaacgaaggggagggctgcgcttcctggttctctggggcacgaggcttctcctcagcactctggcgcccccaacaggttcccagtgttcggctgggacaggcacgctgtggctggctacttcccttccttccatcccccttgggccaaacaggatcggtgcttctggtgagacgtctccccatgcacatcactcccagatgccctagggggcacatttcccacaactcccagagggcaggtttctagaaagtgccaccagtggggaggcgccacaacttcac

SEQ ID NO: 44549 - DNA, 2300 bp, Homo sapien
tgcatatcataagagtcatactcaaatatacctttagtaatcacataaaatatacccggactctgactttactccattccatgaaaatttatttgaggtgaataggagatctagaagaaaacttagaatattatcgtcatggcattgggggaggcaaagattttcacttaaaataataaagagctctagccataaacaagactgattaataagattaagagaatctgttcatctaaaacacattattgagatagtgtaaaagcaaaacagatttgtagaagacattaaaattgtatatgtattttaatacatgtacatatatgcctgtgtgcatgtgtgtacaactgaaacccagaatatatgtaaactacaaatccatttttaaaatacaaacatctcaataaaatttggcagaaaagacctcaaagggaacttcctaaaagacatggttaaatgaccaataaacacatgaaaaagtgctccgaaaaaaaaaaaaacaataaatagctgggcgcagtggctcacgcctgtaatcccagcactttgggaggccgaattgggcagatcacttgagtccaggagttcgagaccagcctgggcaatttggcaaaaccccatctctactaaaaaatacaaagattagccaggcttggtggcatgcgcttgtagtcccagctactgaggcacgagaatcgagcgagcctgggagcccaaaaaacaatcaaaaatcgataaatgaacacttttaaaaagggtgctcaatctcattaattagcacaaaattgcaagtgtagacataaggagagatcactacactcccaaagagtggctggaatgaaagaataattgcacagtgagttgtgtgcatgtggcgaatctggaaccttcaaacatttctggaccccgattcctgcacagacatctgaggctatggctgaaaggtcagatagaatcccagggaagagctccctcaggactgagaaccaaccaaggaaaagcacccaaccctggggtgagacagagctcccaaggtcagctgggtgccctcgtggctgacacaagagttccccgagtcccaccacaggctcagagaatccaaggaacagcaccccactcccccacagcaccaggagacagcacccacagataataattttaaaaacccagcaccaagagaaagcgtctggtaagcgtccccatcagggataagcagaaccaaagaaaagccaacacatcctagctgagagcgagcaacatctaaggacaaatgtgccccacagccgagaacagcactcaaggaagagtccctcacaggctgagataaagcccgcgacagagagtgaccccatagggctgtgatcatgtgtccagggcacagccaccaccaccccggcccttgaacatagacagagctcccaaggcagagtcccccctcagggctgccaccgagcagggaagaaacacggccacacccgaggctgacacaggcaaccaaggcagggtccccaaccctgggcttaggtcatttcagcaggaaaagcccctcacatcactgagggagcccccaagaaaagccccccggacccacaacatagccgagatggggtgcccaaggaaaacgctcccccatggttgacacaggctcccatggcggtgtcctcagagtggagccactttcccagggaaccctaccacacacccgacagagaacacctcagaaaagacactttctgaggaaaaaggacactttcccgggcgaaattaaagcatccagggaaaaactgccccactcacagtcctgaagtcctgaccttgccggaggaggggcggcagcacctcacaaaatggcagtgaagttgtggcgcctccccactgttgtaactttgtagaaacttgccgtttgggagttatgggaaacgtgccccctcgcgtgcttgggagtgatgctcatggggaggcgtctcaccagaagcaccaatccggaaaggctcaaggcggatggaaggaagggaagctgaccgctttcgcgtgccctcccccagcctaacactgggaacctgtgtggggcgccagagtccggaagagaagttttgcgctcagcaggaccgctggcgccagcgggagaaccaggaagcgcagctctccccttagctgactctggtgctctctacaggtggccttcactatcaactgcacagcgggcagaggcagaggaacacagaaccttctcacacagcgggataaaagggtgaatttggagctgacaggcaaatatatcttgtgatatatttctctggctt

SEQ ID NO: 44550 - DNA, 2300 bp, Homo sapien
actgggtagtgggcctaaccctctttggataatttgattaaatctacagatatttttccctgggaaagtacctttacacacaaacttggtgtacaattttagaagtgtgaccagcctaagatctgtttaatttagtggacagatgaccccacttaaaatcaccaaagtgggggtaaagagggtttgtaaactgttgccaattatcctggatactatcaattttgttatttccatataaacaaggaattctctgctgaactcacagcagtaagcagtgtgatatagtattcgtgtgtgcaatctctggaatctgagagacctaggttctgtcacttttccagctggttatacctgggagagctacttaaatgtacactctaagattctatttccataaaaagggcataaaacagtatctaactcatggtgctcttataaggattaccagagataaagcacaaagaggatagtgtatgtgctggttaatacatactttcctttaagttaaaaaacaaacaaacaaacaaacaaacaaacaaacttgtgggatttagtgaacatgggcattctctatattaaaacattaaaaaaataaactgctcatgcaataaacagcttcccacaaactagacttgatattttcaaaatcagtaaaagcccggcacaaaaaaacacttgtttggtttcagcacaccgaatttccttctggttaactggtcgaaatgactgctacttgcaatatcataagcatttctacatgtctaacatttcaaatcttcctttgcgaaacaaatcttttgttattcctgaagttttaaactgatgtatttaatacaagcaagcagaaggaggggaatgatgaaaattagagtagaagaaaatcaatgaaataagaaacagaaaaatcaatgaaatcaaaagttggttcaccgaaaaggtgaaaaaaaaaatctaacaatcttttagcttgactgaccaagaaaaatagaaaggactacacagattatcaaaatcaaaaatgaaaggggggttattaatactgaccttacagaaattaaaaggaatacattatgaacaactttacgccaacaaactaaacaacttaggtaaaatggaaaaaattcttggaagacaaattaccgactcaagaagaaacaggctgggtgcagtggctcacgcctgtaatcccagcactttgggaggccaaggcgggcggatcacctgaggttgggagtttgagaccagcctgacaaacatggagaaactccgtctctactacaaatacaaaattagctgggcgtggtggcgcatgcctgtaatcccagctatttgggaggctgaggcaggagaatcacttgaacccgggaggcggaggttgggtgagccaagatcatgccattgcactccaccccgggcaacaagagcgaacaacaagagtgaaactccgtctcaaaataaatgaataaataaataaataaataataagtagaaaatcgacttaggactatagcatgaaaagagatttaattagtaatttaaaatctccccagaaatacaagccaagccaagatggcttcgcgtgcaaattctatcaaacatttaaggaagaaataataccagtacttagcaatgtcttccaaaaaataacggaggaacactacttcattctatgcggccaatattaccctgatatcaaagccagagaaatatatcacaagatatatttgcctgtcagctccaaattcacccttttatcccgctgtgtgagaaggttctgtgttcctctgcctctgcccgctgtgcagttgatagtgaaggccacctgtagagagcaccagagtcagctaaggggagagctgcgcttcctggttctcccgctggcgccagcggtcctgctgagcgcaaaacttctcttccggactctggcgccccacacaggttcccagtgttaggctgggggagggcacgcgaaagcggtcagcttcccttccttccatccgccttgagcctttccggattggtgcttctggtgagacgcctccccatgagcatcactcccaagcacgcgagggggcacgtttcccataactcccaaacggcaagtttctacaaagttacaacagtggggaggcgccacaacttcactgccattttgtgaggtgctgccgcccctcctccggcaaggtcaggacttcaggactgtgagtggggcagtttttccctggatgctttaatttcgcccgggaaagtgtcctttttcctcagaaagtgtcttttctgaggtgttctctgtcgggtgt

SEQ ID NO: 44551 - DNA, 2300 bp, Homo sapien
aaaatgagatccaggacaaaaattatataagtaaagttgaggaaatatgattaattttagatgtcttcttctacttttttttttttttttttttggttagagaaagggtctcgctctgtcactcagcctgtagtgcagtggcataatcatggctcactgtagccttgaactcctgggatcaagcaatcctccttctttagcttcccaagtagctaggactacaagcatgtgctactatgcccagctaatgagatgtcttatttgtttttccagctttgaggaagctcaagcatatcagaaaatgtttacaatcaaaaggttgtcaaaatgtgagagtacatgcaagtccatggggatttttgagcccaattcaaaagattggaaggactctctgtagagatcctttcaaatagggatactgtcccaattattttccggaattcatttgtcattcaacaagcacttattgaatgcttatcacatgacagtcaaagttttaggtacagagaaatctctgttctctcagagcttacattccagtggggaaagacagacagtaaacagtaacacaacaaacataaatagttaaattatatagtatgttagaaggtgatataaaaagtagaacagaataaggggatcaggaataggaattttgcacatttaaaaggggtggtcaggataggacgcatctttgagcaaaagcaaattgatgcaactaaaacgtagaattctgattgggttaaaggaaaagaatggtgatcatactttgcatttaccttgtgatatgcagtttacaaagctttgccactcagtcaggggtcactggaggaactggtgcagaatttggaaaaaaaggatgaattccattttagccatattacgttttaagtgccacaggaaataaatgcctatctggtagtcagaaatgcagccctggagctaaggagagatatttgtgatagagatgtcgatttggaatcactgtaatacctttgctggctgaagcggtgggaatgaatgggtgagctccccaggggacagcagagtgatgaggtcaaggggagaagctcactattaaatgtctacatttcaggagatgaagacaaagaaaaatgggcagaggagtatacattttacccggatcagagatagagacaaggcaagaaggctgcgttattagcattttaaaatttcctctttcatttcttccttaatgtaagctggttcttttcacgacaaaacactccccccgcgctacacctctttttgcgcgaatctttctccaggaccttaaaatggtttactgagcacttcccgcgagccaagtatttggggttccagatcctgggattttgtcctgacactgcctcctcgttttaacacccttgcctccttctgcagtgccagtttccagggagctgaagcacaggaaaggcctacagaaaacaaaaggcacagtttcacaaaaagccaaaaccaaccaacccacaaaacacaactgtcaggggtctatatccagcacctaccgcctttccccaacgcccccagccccgcccctcggccccacctcctcccgcccctcggccccacctcctccccgccccctcggtcccactcctccgcgccccctcggtcccacctcctccccgcccctcggtcccacctcctccccgccccctcggccctcacccactctccgtcccctccgccccgccccctacgccccacccatcctcccgtaggccccgccctcggccccacctcctccccgcccctcggccccacctcctccccgcccctcggccccacctcctccccgcccctcggccccacccatcctccccgcaggccccgccactcgaccgcacccaccagggccccccccccccggctacgcccacccacccacccactggccccgcccctcggctacacccaccctcgtgcgggccccgcgcgtcttccccaccccgcccgtctgcctaccccgcccctcgcccccacacgttctctacgcaggcccccgtccctctgccccaccctgttctcgccactggccctgcccccatttgccggcgcccttcctcttcgcttccccgtagctcccgctttcgcctcttcgtttatgactccgttgggctccggccctcctagagaggcctccatagcgcaggttcgtgggttctcgcggacctttttccgtgtagctttctgcttcttcccggcattcctgtttccgttttctcacagccctctggcttttccaccactgagacactttgcgctcaggacttcag

SEQ ID NO: 44552 - DNA, 2300 bp, Homo sapien
tgagtagtatgtttacaaggaagaacgttccaaggagcacaccgactaacatggaaagggagggaagtagcaagaggagaaacccgggtgtaggcgtcagaagtatagagcagtgctggatggagagagaagtacattctcgggggagcagaagcctcagggggattggctgcctggtagaagttactaccatttcaagattcctcctagaactcgagtacaaagagattgctgaggggcatactaagttgctggggccacataaacagaggtggagtctggtgcttgaagacatttcctgactctggtcagggaagcaatctgtggcttcgggtttttttttttttttttcaagttcccaacactcagtgaaaagtgggtttatgctgggacaaaacagccttggaatgagcagttagcaggtaagctcatttactaggtcttctggggagaggatgatggggagaatgggaaggatcctcacctaggtttcttgcttccacaaagcccagctctgtgtgaacaggacagtgtggttcaagtggagtcagggtataggggaacaggcagccatgaggtttcttgggaagacacagacccaagtactaatagcagagaatgggcacacagtcactggctctgatttgggacagttcctgacctgacagggacagaaagtggaattggacatcgtttgagtgctttttttgtttagctcatcatcctgagagcttagagagctggttagtgagggtgaatacacacaggggcagcttggagttgcctgagtattacttgttttagcaaggaggttatatggccatgagatggaaagaaccatttgagaatcatgagttccaggcagaatgataggaattgaactgacagtggtaccactgatggtatgaagaatttgagaaggaatttgtacttgcagggggaactcatttcaaatgagctcatttcaaaatatttttagttttgagggtggtaggagcctcaacagggtatgctcagaatccaacaggtagaggcctgaagttggggcagcaggccagggcttgagacttgtagatcattcatgttgaaatcaaagtcttgagaaaacaaagagcccacacaaactaaggagcgatcggagaaatacagaaaaaataggaagtcactgttctcaaaagacaaagctccagtatggaggtgagaactgtgaaaattctggtgagagaggttggacaggctgagaacagaaaaaaaatactgtcctgaggaatactaaagaggagagatgagagataggggtcaagggtgacttcggagctggggacatttgctttaaaacagcagtaaaaaggagcaagaggagaaggagaaatccaccacaccacccaagattttttcttcgggagggaagtgtttacgagcattgggaaatctaagcacaaaccgatccaatctttgctgtaaggttgatgagtttctgtgtacagattcctagcgtgagagatgacttatatcagatgtttacatgtaaagaaaaccgactacacagacacacacataatccatacctttgagtcgattgttttatgaactgctacagtgctctgtgtgtgtgtggtgtttttttgtgtttttttttttttctttcccgatgaggacaatacaaggagaatccgatttaaatttaaattacagagatggagattgaggctcctcccaaggggacaacttatcctgttaagagacactgggggacgatattgagatgggttatgaaagatcaattcctatgaaagatcaattcccctgagagctctgagaataggatcaaagtagaaagcgcagtctgcctctgcttggttacactgagccgatgtttctttagccaaaggcagtgggctagtttagacggcctttcattcccggcagcgcctgtgggtgcgtgtgacctgggacagaggggcaaaggaacctggcagagcgagcttgggatgccgcggcccctttaagagcggcggcggcggcgcgcgctccgacggctacccccgggccccgcccctttcccgtgagccctcggggagtggtccgaccgcgggcggccgccggtgaggtaggggcgggaggcggggggagacatggctcggcgcggctggcggcgggcacccctccgccgtggcgtcggcagcagtccccgagcccgcaggctcatgcggcccctttggttgctcctcgcagtgggcgtctttgactgggcaggggcttcggacggcggcggcggagaggctagagccatggacgag

SEQ ID NO: 44553 - DNA, 2300 bp, Homo sapien
cctccagttctgctccatttttcttcccatttacattggaaagtctcaaaacagttgtctaccctatgctgtctctacttcaactccaattccctctgcaaccctgttccatcaaatccttccactttcctccactagcaccaccctaatctaaaccaccatcagctttgataggaactattgagaaagcctcctaactaatctccctatttaaatttttaatctcttctgaaccattctccatatagtagtcaaggtggtcttttaaaaatgtaaaccagatctggaatactactcagcaataaaaaagagcaagctatggaaacacccaacaacttggatgaatctcaagggactcaaaaccgagtgagaaaagccaatctcaaaatgaatattgtatgattcatttacaaaacattctcaaaatatcaaacttacagaaatggaggacggatcagtggttgccaatggtgaaagacttggggaactgaggagatagttattgctgttttataattacaatacaacaggtaagatccttgcaatgatgaaactgttttataattgaccatggtagtggaaagaggccacacgtgataaaattgtatagaacacacacataccagacgtgcacgcgcgtacacacacacacagtagaagtaaaactgaagaaatcaaaataagattggtagattgtattaatgtcaatattctagttatcttatagtgtagtcttgcattgggggaaattgggcaagggggaccccagatctctctgtattatttcttacaaatgcatgtgaatctacaatcatcccaaaagacaaaagtttagttaaaagaaatataagtcagaccgtgtcacgccttggggttaagccactcattcaatgccctcccattgattttggaatgaagtggcctgcccatggactgcacctgcccatggactagtatgcaatccacgatctggtccctgccaacctgtccagccttactttctggtactctccccagctttcctggcgccaatcatgatcaccaccttttagttccaaagcatcaagatttggtccctccttctgacttgttttctggaaagctttttcctggctctttcatatctttcagggttcagcttaaatgtcacctcctcctttcctaatcacactatttgtacttttcctgcacaggctttatccaaatttgattattttctcacttctttattgtctgtctcccccactagattacaagctcccagggcagggtgcgtactgtctgcagacaacgctgttatcaccagagcccggcactgagcttggcacatggcgagggctcagtaaactgaatgctgagtgaatgagacgccacgcgccgctttgccatcggtgctttctgagtgacgttaaaacgctctggatggtggcactgggattatggatggggcttatttagctccctccggcttgctactaaggggaggggtcgtcggtgggcctttcggcgccgctgcaagccaccgggttccgaagtcggaggccgaaacggcgtgggccccgaagcggggccgcttttcagggagtgcgcaggttagcgaggaccccggtgaggcgagacgccaccctcacttggctgtctttgttgctcccacctccccagccccagccgcctgcagtgattcgtgactcccgcaggcctctaaggaccgctgcgcgagggagggggcccgaggcgcccccggcccgccctcctcccggtcttcggatccgagccggtcctcgggaaagagcctgccaccgcgtccccgcagccaccctctccgcgtgcccggccctctccagtggcgggggcacgtgggcgcgcggggtgcgtggcaagccgcccctctccccacgcccgtccggccgtctcccgcgcgcgcgccccgcacacagcctccgtgcagtgggcagagcccggccccgcgcgcgccccgccccgcccctggctagccgcgcccgcccccgcgctcctgcttcctcccctctttccctccccgcctcccaggcgcgcacccctcccctcgcgcccctcccgcgccctacatccaccgcccggcggagggggctcagtccgcagccgccgccgccaccgccgcgcctcggcctcggtgcaggcagcggccgccgccgccgagacagctgcgcgggcgagcatccccacgcagtaagcccgctttctttccgcttgtgcgcgcgtgtgtgcctcccgcccgccggcgtcctgggtcccgggggagcggctgcccttctgccccg

SEQ ID NO: 44554 - DNA, 2300 bp, Homo sapien
ttgaaatttttagtatatctggtagataacttttaaaaatataacccatcttttcccaaactggatagggataattcctctctttgcaaattgtgaggaatattatgattgtatcatataaaataaatatagaaacgtgtagaataaatgatcttccagagtatatagaggatatcaccagataatactctgtactaaatataaggacacaaaactggactttattatatttctataactggtaatatccttccagtttttgcttgtttattaaatgaatatactgttaaagatttggttatgttgtagatcttaattatgttggaattattaaaaatgaggcatctttaatctgtactgcttatttccaataaattattttgccgaatgagagccagtttaccagttcttttgttaaagaaaatgagccagtggctacctcagttgtatttatcattgccttttatggtaaacatttaaaatgtgtttttaatggtgcacatgccgatgtttctgacctctatagtagcataagtatttgaataaaagtgaggtaaatgagaagtctgtgccacccagtctcatcacaagtgtacctaattaagaagatgtttggaattcactgttctttgatttcttgggtgggagagaatattctgaaggctgtgattaaggaatcgttaccatgacaatcacattcaaagaattgagaggagacaatgagtctgtgggggatcatctcttttgattgatttgactcttcttttaagttctttcaaacagctgttgtcactggattttcttttccacgtaattcacacaattgattggtgatgtggggatcattgaagcttggttgtcagtagtgataagggtcagcagtgtccatgaccacaatacttttgctaaacctggagagtgattgtatgtgttaaatgtcactaaaaagtaactcttggcttctttctggaataatatatgtggtttgtctattttcacttattaattttgtcagggtgggatatgattatcatgatctctttgaaagcatgactaactctaaagtgtttgagctttattttggattactttgctgtcatcttacccagtgttttgtgtgctgttttgtttttattctttaacttgcacaatgttgtcaacgtaatttatatgatgttctggtcagagacacagttacacgctgcagattgaaaagtacacacaaatatacccaccatgagtgcttcagcctcacgaccccagctcatgttaagtgggacatgctagtacagatgataaagtgaaatggagatacaaaggcagttcagatctgactgtcaatttttctcctttgtggactaattctgggtggtgaaaccatgaactatggaacgaagactgctccagcatgagtctgagttgaatcccatgtgagagctttgcctcctcagcctttgggcctttctttcttctgccctctggagggtgtcagagaacatgaaatgcaaggactttctggaaaggatagccagggtttggtctggtaactagaagacactttccctgccccttccccaccaccccctccaagccggaacatgtagaggtgaggagcagacagagagatggcagggaagccattggcaaggtgggaatcttaggaaggaagtgattccggttcttgaaaaagacaaccggattccattaagtagaatcggtatgaattgtactcatctctaggaaaaatcaattccagaagggtgagtaagatgaaatatgataagactagtgtgtgacagattcaggtttgaagcttaaggtggatggaatcgaaagaaaggtatatttggtgtcaagtgtttgtggcggcatgtgaaatcattatccacgtttgataacagtttgactctttgcctgctataataatagtagtaagtatgtatttaacattcaatgcgtaccttgtgtgggggaggcactgctaaatgctttgcatggacgtacctccttacctctatgaggtaggtggccattatgatgctcatagaggctggacagctaatatgaggcggagcctgtatttgggctcaggcagtctgactctggtgcccctgctgtgaagagctgtgccctgctgcattcctcctgtagctgcacgaaagggtgtggaatcttctagaaacagtgagttctatatgagtggagtgtggtggtgggagaatagatggagtaaagccttttgtgtaaacataccatgctaagtactgggagatagaaacgaaatgagagatttttttgtt

SEQ ID NO: 44555 - DNA, 2300 bp, Homo sapien
aatgagagatttttttgttttgttttttgagatggagtcttgctctgtcgctcaggctggagtgcagtggtgcgatctcagatcaccgcaacctccaccttccaggttcaagcaattctcctgcctcagcctcctgagtacctgggactacagacacacgccaccacgccggctaatttttgtatttttttggtagagacggggtttcatcatgttggccaggatggtcttgatctcatgacctcgtgatccacccaccgcagcctcccaaagtgctgggattacaggtgccagccaccacacccagccaaaataagacatttctttgcccctgccaccaagatatttaacatcttacaggactaacaaaacctaacatgaaccagtccagattcatatgatagaatatgaaaatgttttctggaaagaatagccagagtcccagtctggttactagaagacactttccctgtcctttccccacctgtagcccttccaagctggaatgtgcagaggtgaggaacagacagagagatggcagggaagctattggcaaggtgggaatcttaggaaggaagtgattccggttcttgaaaaagagaaccggattccgtcaagtagaatcggtatgaattgtacccatctctaggaaacatcaattccagaagggtgaattagatgaaatatgataagactagtgtgtgacagattcaggtttgacgcttcagttggattgaatcgaaagagaggtatatttggtatcaggcgtttgtggtggcatgtgaaatcattatccacgtttgataacagtttgactttttgcctgctgtaataatagtagtaagtatgtatttaacattcaatgggtaccttgtgtgggggaggccctgctaaatgctttacatggacgtacgtccttacctctatgaggtaggtggccattatgatgctcatagaggctggacagctaatatgaggcggagccggtatttgagctcaggcagtctgactctggtgcccctgctgtgaagagctgtgccctgctgcattcctcctgtagctgcacgaaagggtgtggaatcttctagaagcagtgagttctatatgagtggagtgtggtggtgggagatgagatggagtaaagcctttggtgtaaacataccatgctaaatactaggagatagaaatgaaataagaaatatttcttcctgacaccaagatacttaacattttaccggacaaagaaaacctaacatgaaacaatccagattcatatgatagaatatgaagatactgtctctacttaagtacaggtgggaggaagactggaagatgttcctttgaattaagtcactttaaaacatttgctttcaaatgttagcgcttcaccatgggcacaaaatttgtcttcctccaggcttttggcctggcaaacaagaaccctgtccctatagtcagcagattcatccattttgagttgggaagcattatcttcagccttttcttcctgacaacgatcctgacaatcgtcgtcaggatctctaaagagatgaactcattagcctagtgaaccaacagtctcagctgtttatttaccagcacattaacagtttttccatttatatccactgcctgtgtgacgatcagcctggaaatggtttgagcatagggtgggaggggtggttacacacctggttgtaatccttggtttatttttgccctgtttccatctatacttcttgagagcttcctgtgttacaggcactgacctgggtgttggggcagagtagtgaaaaaacagactgggtcccccgcccaaggcactgtcttttcctcagatttcattcgctcatgtacattttcatagttgatctaaaagcggcatttggtgtgaattctaggatttcacacttttaggataatacagtgatcacactccctttctcctttgccccagccagtcctttctgaataaaggtcgagggattgggggaggaaggcagtgatgcgaatgggcctgtggggaggtcgcacgggcttgaggagggcagcatgtcgtagcgggccatatttgtgtcagggttgggaacggcacaaggcacacctgtttcctagtgctgcagaaccctcgtcctgggatgagcctgcccgctagtctgcatcctaatcctgctgttgattggagataacttcagcggtcacagggcacctcgtctccatggcaacccctctaaatattcctctagtgacttgtgctctacattctggctggatcagagccctcctgtggcaaaatattc

SEQ ID NO: 44556 - DNA, 2300 bp, Homo sapien
ggaagtaactggaataaatgctattgttgcaggcccaagctcccagtccatcctggctggtcatagttgactaattcatggtggtcaaaaagtgattctcttgtctttgaattttctcttgtattttaggcaaaacagatttgttttttgatactttcataaagctgtctatccatattctgttgtcacttttcaaaatgatcagaaacctaaagaactaccatacttgcctaaaagaagacacttcctgatgcatagcttgaaacaggaattgacttcctaaaggaaagtatttggcacaccaagcctattgttcacagcgctgcaagagaggcatttcaacatacatgggctcttcctaaaaatataacttgctaaaataaaaaattcagggttcattaaggttaatcatctaataaagtaagagaatttcctctaggtgaaaagtttcagtttattttaggggtgtggtgttgttacaactggctaatctccgcaccataatttaatcaggctggatgagaaagagactagaaaggcgtggagccagagcacagtgtagcttctcttcttttcccaggcttatttttttcctctaacatgtaataaatttactcgtaacaacctggcttttattgtgtcattttctagctaactgggagttactgatgtcagttgtcttttagaataacttttccttaaacatttgaagatcgtaagaattggggaactcattcattcatttattcatggagcatttactgctcacctactgtgtgctataggaacatgaagacaagcaaagcactgccctggccctcaacctggtaggggagatgtgtgaatagggccaaaaccacttaaacaagacagtggctataaaggtgtctgtaccagcgagaaggtcagctgccttccttgaagttgagtggccaaaaccactttcaggattgcaggtgggactatgttttggaggcttgatggatttttcagttatttagttcattctttcaaggaatagttattgagagcctcctgggagctgggcagtgttctaggctctggggccactgcagtgagctccagtactaaatccctgccttcatggagcaaagcaggagatcagacagcaaggagagaaatcagtgcaataccagcagacttgaagtagggaaaggaacaaccatgactctgggcacaggggacagtgaggaggccagtgaggtgggagtgagggaaagggggctaagggtaaggccagagaaggaatgtggaagaaggtcctggagggacttgggggctttcttttcctagaacatgctcctaatagccagcccccagacatctgatggcctgttgagctattacaacattttaggttgatgtcttcattttcattcatgtttttccttttattgtccctgatgctgaaaaacaagaggttgagtttgtgagacaaaatgtcttcattgtgtgtgtgatggggataggcatagtctccccatcttgttctgtgctgtctgccgttaaggaggtggggagattacgatcactctcctttcctgtacagtaatctgctgatctctggaacatactaaggaggacatagagtgacaacatctataatccccttaatctctatattcatactgtctaatctccttgagttacactggtaacataagtctatctcttagagttacttttatcattaacagcacaaaaatgtattatttacagggccaaatgcaagctcttgaggcatataaagtggattaataaggttggctcagcgttaagctatgccagagccgagtccaaattttattccggtacagggatgactttctatgtggcctctctggctctggagctaatttggatgctgagtagccccgcaggtatttatatgtagcgtttggtatttttactgggtcctattcttctcccttggatcacctaaaatggttaagaattttctagtgggattaaggttgtgatctctggggaggggtgggacatctgctctcggttatttttgtgttagccgcttccccttaaatgtatgttcacaaatgagccacagccttatcagctggggttgagggaagactggtctaggtgctgctcctgaacttggtctctgagccatggcttcccatagacactcaggtaaaacttcatgctctttatcttatattgagcacagttttgttagggcagtgaatccgtcattgggctaaaagatggtttttgatgaaatgattttagtcttgtctgaatagtaaataaattatagc

SEQ ID NO: 44557 - DNA, 2300 bp, Homo sapien
ggcttctgtgtgacactggaaagaccaacaagaatggattaaagagagtgattttccatatgctgtcactgggacaggtacttttctctgtagacacacaggctaaaagcagtttaaaagcttccttacctaaacagtacatagttcaaggagataggccctgtgtccattgcgtctctagtttttgtttctaacccattatataaagaaacatcccagtttgctttttagagaaaagttcaagttagaaccattctctggtcttgctaagtctcttaattgtgacacaactgtcctaagcaactgtccttgcacaagaatgtcactcatctgcttcatctgccagctccttagagatgaggggggtctgtgtgtcagcaggaggcagaaggccctgtggctcatccagtggcctgatttcctttgtttggaggcttggttctgagtgagagttcaacagcctttgcccaggcggcttctcaaacacagggtgtggtttccttagctcactctctgctgtttggttgctcatggcaacaagatccaaataacttggacatgtgtttgtataaaaaaaacctgggaatggaacccaaagtgagactttggggctttcagttagtggaagagctgcggtgagtaccaggcaactgctcatttattttctctcattctttctctctaaattacgctggaagtttgctagcacaataaccatgtttgtggatagttttagaaagtagtctcaattcttgtatttcctgcacaaatgaaataattgctatctatttacccgtgcaaatttctttttcgggggagaggaacaaattagcatatgtttaaagaagttgaaagctaatagaaactcatatttggtaccttttgggtggcaggattctataggaaatgccttggcaaagggagctgcagagtgccttagtaatgcttgggattgcaggcgtgttgtctagggccacagccggggaggggaccagggagggaagaggggttgttcatacggagggagtggaagggattcttggaataattttttccagactctattttaagattataatttttaagacagcaaatatcccaaatggtaatactggttacacttctatgagcatattgattctcacttgcttgactcaagggagggtttgattttggtcacaaagccacccgtgactatgacagataattcaaggttgccaaacttgcctgtgccaattgacaaagccatttatataagtcctctcttgctatattgctctggcctcaaaaggcagtaaactctcttggacaaaactctttaggatctattcagggatttaacacttttctgctaaattgcaagtaaatttaaacattttaaacaaattaacaaggattgcttaggtacctggtgtggtacagaatgagctgtcagtttctattctgatgaatagaattttatagataggaggaacgggaggcctccagaggatactaccctccctaaaaagagacggaggaagagctgaaagcgggcagagaggcttcttgatgacaacgtggtgggcttagagaagctgctgcctgcaggcggggcccctgctttcctgcacccctttgagcctctgccccacactcttcctttgtataaaacaactgcttcttgcctgcctgccccatcacacccctccactccatcgggtcactgctcaatggcacaatagcactgctcagccatacctcccagcatcctgtcccctatctggtgacttggccaacacaggctctgatccacttgccccgctccgcatcttttgtgaatcagcacagttgatatatctgagcaggggcttctaccatctccccagggaatcactagccatcggccatctggccccgcggggtgcttttgttcctggaatcatagtgaagtatctgttgtcttggtgcctggtagtcagctcggctgaaggggaagctgggtcttggtcctcagaccccatggactccaaggcagcattgtgcaggtgcctctgggagccactgctcagggtgctggggcatttcctgtggtcatttgtcctgtctgcttgcccccgcaggtccctccagctacaaggtgggcaccatggcggagaagtttgactgccactactgcagggatcccttgcaggggaagaagtatgtgcaaaaggatggccaccactgctgcctgaaatgctttgacaagttctgtgccaacacctgtgtggaatgccgcaagcccatcggtgcggactccaaggtaacgggcatcccca

SEQ ID NO: 44558 - DNA, 2300 bp, Homo sapien
cttataatgtaaacctctgtccactggctgcagggaataacaacagtactgaatttgcttttaagtatttagtgttatttgaaataatcacacattttccatatgcttatatgggcttgggaaaaagaagggaatattatgaattacaaaaaaaacctctaacttgaagaatattattcatcgcttcatataaacagagctgatttagcatttgaaagtgctgaatactagggaaccaccagactctcctctaaattatctctgttacccccacgagagattgggtgtgagcacgtgtaaagaaggccttttaggggatgtcatgtctcaaagacagttaaggaatgagttcctctcacgtatgtgtgttttttaacaagcaaagtaatctattacttgattgaaatatttttctgctcccgagggctagtttttctctttaaaaaggggtggaattgtgtaattcctatatagtaacaacacagaagatgtagtgactctggtgtggatataaattatattactatacacaggaagtttcactataaaaactcactagtgcaagctgagtatgatagcaatcaagataaatactaacaattatttaaatactctcagggtcattaagaaatcaaaagacatggcaaaggaagcagttggaggccaagcagaagaccacttgaaactcaaagatgggcagcaacaaaatgagactaaaaagaagaaaggatggctggatcaggaagaccaggaagcaccactgcaggtttgctgacttgacactttatcaggggatgagaaccagattataaagttcagatggaacccagagcaaaaatctctgtctctgagaaagaagacatgagcagattctctggctgcattttattttttattttatttatttatttattaattttgagatggagtttcactcttctcagccaggctggagtgcaatggcacaatcttggctcactgcaacctctgcctcccaggttcaagccattctcctgcctcagcctcccaagtagctgggattacaggcatctgacaccacgctcagctcagttttgtatttttggtagagatggggttttaccatgttggccaggctggtcttgaactcctgacctcaggtgatccgcccgcctcagcttcccaaagtgctaggattacaggtgtaagccactgcgcccaacctctggctgcatttttatgttacagtctctattacccagtaccactgcaggtcattgtcagccaccctcagaaaaccatagaatgttttcctagtgaaataagcagaaaacagcaaattgtagattagtagtccttaatttgaaatccaaattgctttaacagattccacatcctacattggtttcccccatcttgcattctgtggtaccatatacaactccatcaactggaccttacacccctgtaacagataagataaaccatacatacttctacaagtttaaaatcattaactgaagaatgtctcatctatctaaagtcaagtcactgggtaaataaatgcccaaactgagctcagactatactcagtttgaattattaccatagcccaatttatatttccagtttttagtgtattattcaccagcattggtcatatgttttatatatgattgtttatgcttgcatttctcaggagggtgccttcaagaatcctctcagtgcttttgagaaatgtcaggctgttggctcctgttactgtgttaatggatagctccacagtcacatactttgaattaggatggtgtgatgttcataacaatgaccctgtggtcctgaatcctcaggataacatttagcctagctttgtgcattctaactagtgctttgaaaattgacaatccgcaaatatcatgatataggaaccctcattcaaaaggttacactcttttgttatactagataacatttaccattgaaatttttaaactagagttctctgatgtcactcaggtatcttgagattgaatgatatttttatgcaaatttcctagaaaggggacgccaaaataaaagctcaagaggaagctgacaaacgcaagaaagaacacgagagaattatgttacaaaatttacaagaacggttagaaaggaaaaaggtactcgctctctgtttggggggacttgattctgtgtttaaaacaatgttgggcacctgatatcagcatgtttttaaaaatcacaaatctgatatatgctagttcctggtggttttcccactcgattctcttccttatccaaggatctgacttctccta

SEQ ID NO: 44559 - DNA, 2300 bp, Homo sapien
ttctgaattcccaatttatggtgaaacttaattttcccaattcctcgccagctcagtatttctaacacttggtgtaatgttttgtttgagacatttttaaaacctattaatcattggctcctactcatccacaaacttatgctgccaccgccactaacaactcaattatctttatgtctacaaataccctggcccatcatagtaaacactttaaattctttgttaaagtgttgttgaagatcataggtgttcaatatatctttgttgttgacccagatgaaatcagtcatgatttatagaagtgatcctatcctttatcatcaaatacaattggccgtggtttgctgactcctgtgttagctatccgtattcttaacatctaatccttttatctccctgtattttagttgctgcagcaaacgagattgctaaggaaaggaggaagcaagatgtggttaatcgtgttgcaacccattcctcaaatataagatcgacatttaaaccaggtataatttctctgatgctttgatagatgtcaaagtgtcatatctttaaaatttgatatcctattaatatctaactatattcttttttttttagtaatcgatggatccatgcttaaaaatgacataaaacaaagattagcaagagagcgcagagaggagaaaaggagacagcaagacggtatattttagaccttttttcaaaaatcaaaatgaattgtgttatatattgcaaagtgtttttaacttattcctcctaatttgtttatatgatagagtataatttttatattatgtattattttggattaaatccttttactaaatcaggcaagaaggcccatgaaaattctttgattaaattgtttaatttttgaaggagtagtttatcttagctttgattttctgaaaactaaggtctggaaatttcttcaatatttgtaaaaacaatcagaatgggatttcagtaaaagtgattcttttttttttgttttgttttgaggcggagtcttactctgtcacccaagctggagttcagtggcgcgatctcagctcactgcagcctccgcctcccgggttcatgccattctcctgcctcagcctcccgagtaactgggactacagtcacccgccaccacacccggctaattttttgtatttttggtagagacggggtttcatcgtgttagcccgggtggtcttgatctcctgacctcgtgatccacccacctcggccttccaaagtgctgggattacaggcgtgagccaccgcgcctggccagtaaaagttattctaaaaatgaaaataaattgccaataatcctaacatagataagatgaaaagcatgttaccaagttgtaaaaagattatccttttagatcctaatttatacagagtcacacttcagaagcatttagtgagggaaaatttgaatataggaaaaattttgctctcctgtaatatggtatatggttaagtccattaatgtaaaactggcatgtttaatatggtctgtatagatgaggactttgaaagaagtttcctagtagaagggaacaaaacatgtatcctggccatgcagtttttaataattagtattttaatgtacagcatattaatatggtagggtttgactttagctcaaatcagcagaaatatcacatgaaagaaaatattttttcttaatttggaattgtagtttggacaggatgagagtcatttggcacagacaatccagttctccagagttaaatgaatactcagtgaaaatggttctgcagtggctacctctgttcacttttataataaatctttagttactagcacaggttgtgttattttaagaaagtgaatgagatgtgttaactttttccttctgtgtgtgtaatgtggaaaacctaaatattttcttggctcttacaccttgaaaatgtatttggaatatttcagccaataaagaaacacaactacttgaaaaagaaagaaagaccaagctccaatatgaaaaacagatggaggaaagacagagaaagctgaaggagcgaaaagagaaagaagaacaacggagaatagctgcagaagaaaaaagacaccagaaggatgaagcacaaaaggtacataattttgcagcctgtgcatgagaggataaactgtgttgcctgagtctagaatattgttttctcaggccttctctgccttacttgccctgtagaaagggaaccaatcccagctctttcttcttcgcttcctcttcccctcagcattatataggcttttacccatgtcctgataagatg

SEQ ID NO: 44560 - DNA, 2300 bp, Homo sapien
ggatcatacattgcatgtggtctctttagcctcctgtgatctggaacacttctctgatttttgttgttagtctttcatgacactaatattttgaagcattggggccagttattttgtggactatatcacagtctctatctctgtctgaatgtttcttcattattagatttgggttcaacatttttgcaagaaactacaaagctgatgtgttttgctaaattttctgtttgcggagttccagataaggtcatgaaagctgaacttgtgtttgtgtatgtgtgtgtgttttgtgggcaccctaatcatatgtgtgtcgtattaataatcatgaatggctaccatcctggatatcatgcaaagcattggtctctgtatttacttagaagcagagcttcgggagttataatgccaaactgtttatttttgccactagttttttttttcttcgagacagagtctcgctctgttgcccaggctggagtgcagtggcagctctcggctcactgcaacctccacctcccgggttcaagcgattctcctgcctcagcctcccgagcagctgggattacaggggcccgccacgacgcccagctaatttttgtatttttactagagacggggtttccccatgctggccaggctgatcttgaactcctgacttcaggttatccacctgcctgggcctcccaaagtgctggggctgggattacaggtgtgaaccaccgtgcctggccccccacttgtattaatctacatcatcgcaaacacttattgaccacgttttaatttttgttaaaattgtaggtgcaacgtaatgtcttttttttctttttcttttcttttctttttttttttttttttttttttgagacagagtctcgctctgtcacccaggctggagtgcagtggtgctatcatggctcactgcaaactccacctcccgggttcaagcgattctcctgcctcagcctcccaagtagctgggattacaggcacccaccaccatgcccggctaatttttgtatttttagtagagtcggagtttcaccatgttggccaggctagtctcgaactcctgacctcaaatgatccacccacctcagcctcccaaaatgctaggattacaggcatgagccaccgtgcctgccccatattacatattatatatattatatattaatatatgtaacttatgctatcattgctaacatatgtaatatatgctattattagcttcttccattttacagctcccatgtcatttggagactcagtggtctcgccaaagtgcccatctcacaagtggtccagccccattttgggatctcctgcaccacacttaatggccccaaccataaactgcgtgcctacaactatgtcactacacacacactcacaacagtggtgactccacctcataagggcaagcccccatgaagtgaggtctgccccttaaaggagcctcaggccaatgacggttttccttgtgaatgggaaaaacattctgcaacctggtagagtctctcccaaaatccggagagattgatgccaataagtcctctgcctctctttgaagactcacaaacatcttaaagatatttcacccaactttgagacctatgtgtcatgatttattgtgcaacagtttagggaagcctactcatgatggggcccctagcacctcaaagcaagcctgcgactcccaacctctccctaggcttcttcccccaacttgggtctttctttgtgtaatgtttcaaggactagtaaactcatgatacaagcgcacccaggaggcacgccgtaaatgttctttaaatgaatgaatgaatgaggaaggaatgttactgtgttgctaggtaaaggtgaagaaaggaatgttgggggggccaagctgggtgctgattggctagtcctcacaatgcagtaggggcagagcacggaacataggagagggtttctttagaccaggtagtcgctgcccagccggtcaggacgtgggacgcaaggggcaatcctgcccggttcgcaggtccgaggcgggcgcggtggcccttcgggccccgccccgccccgccccgccccgccccgcccaccggcagcccggccacgacccaagcggaggccgcgccgacgcctgcgcaatgtatgcggagagccaccaccgcctccggtcccgactccgatgatggcggacggcgccgcagctggcgctggcggcagcccatccttgagagagctgcgggcacggatgggtgagcgggcgggtggctcccgggggtggttcgggcccgcgtggg

SEQ ID NO: 44561 - DNA, 2300 bp, Homo sapien
gggcaaaggatataaacagacacttctcaaaagaagacatttatgcagccaaaagacacatgaaaaaatgctcatcatcactggccatcagagaaatgcaaatcaaaaccacaatgagataccatctcacaccagttagaatggcgatcattaaaaagtcaggaaacaacaggtgctggagaggatgtggagaaataggaacacttttacactgttggtgggactgtaaactagttcaaccattgtggaagtcagtgtggcaattcctcaaggatctagaattagaaataccatttgacccagccatcccatttcttggtatatacccaaaggattataaatcatgctgctataaagacacatgcacacatatgtttattgcagcattattcacaatagcaaagacttggaaccaacccaaatgtccatcaatgatagactggattaagaaactgtggcacatatacaccatggaatactatgcagccataaaaaatgatgagttcatgtcctttgtagggacatggatgaagctggaaaccatcattctcagcaaactgtcgcaaggacaaaaaaccaaacaccgcatgttctcactcacaggtgggaattgaacaatgagaacacatggacacaggaaggggaacatcacacaccgggtcctgttgtggggtggggggagtgtggagggatagcattaggagatatacctaatgttaaatgacgagttaatgggtgcagcacaccaacatggcacgtgtatatatatgtaacaaacctgcacgttgtgcacatgtaccctaaaacttaaagtataataataaaaaacaaaaaagaaaaaacaccacaaagcagaattcataatataactatggttatatatatatattttagggctcttccttgaaataattaagaaagtattgatacaatcttttgaagagagttttaaatttcatttattggatatatcttcctctaggtaataataaaaatacatgaaagaaaaattcatgtattttggtcactactgcaagaattaaagaaagaggaaagaaacatgaaaggtggcttgccagttaagacaggtttattttaaagaaaacaaacccgagaggagccttttggctgagttaggttagaggcacacttttttacagactaagagtttttaaggattcagggtgggagagtttattagaggcttggactgcttctgtgtttctttgttgtgtttatttgggagggatagttgtgtgtttgttcccatacatatttttttgcagctgcaagcatacaccccaagtctgcttttagcttccctatcttagtgcacctgaagggagagggaaaaaacaaaaaaaacaaaaaaaacctttctggatctgcctttaggttctgcatgccaggcaggcccgactgcacagggagtgagccgtggcgctcaggacgtccacttcctgggacaggacggccgggtcacggatccgcgggagccgggaggcccgcgggccgcgcacagccctcgggcggccgggcaggccagagcccgaggccactccgggctcagcgtcgagcggctggtcgggtctccatgcatcacgccggggaggggctgcggcgggcgccgggcctccagcgaactgccgccaccgctgccctgccactgctgctgggctggagctgctatgcctggccccgcctagagccttttcttttctttcttttttttttattattatactttaagttctacggtacatgtgcacaacgtgcaggtttgttacatatgtatacatgtgccatgttggtgtgctgcacccattacctcgttatttacattaggtatatctcctaatgctatccctccacactccccccaccccacaacagaccccggtgtgtgatgttccccttcctgtgtccaagcgttctccttgttcaattcccacctatgagtgagaacatgtggtgtttggttttatgtccctgcgatagtttgctgagagtgatggtttccagcttcatccatgtccctacaaaggacatgaactcatcattttttacggctgcatagtattccatggtgtatatgtgccacagtttcttaatccagtctatcactgatggacatttgggttggttccaagtctttgctattgtgaataatgctgcaataaacatatgtgtgcatgtgtctttatagcagcatgatttataatcctttgggtatatacccagtaatggggtggctgggtcaaatggtatttctagttctagatccttgaggaattgccaca

SEQ ID NO: 44562 - DNA, 2300 bp, Homo sapien
agtcaatcagctcagccctctctgtgggaggacaagtaaatcagcagagccatatggctatctaggcctttgagtttccaggcatggatggctcataacatcccgtgatagccttttctggtgcttatcaattcctattgtcaataatgacttatttatatctatctcacatctcagactgcaatttcagccaatttcctacttctctgtagatatggagagcagatggtcaacattctcctcataaccttccagggaatggaagatacccgttgaagccctcccaggtgacaattgttttcctgacaaaagagttccaatttctttttttggtacaaatttaattttctagtcaattatttcatttgtgctatgttggatttttaacaaaacatagtgtttttctttgaaaaaaaagaacacatgcaaatgattacaattcttaccgtacaaaagcatgttcagtgaaaactgaggtttcctcccacccaaaacccctcagtttccatctctagaagcaactattcttaccagggtccttttccagagatatttgatgacatatctaagtatatataaataattctcctctaaattcttttcttcatttcagcaaacattaattaagcacctactatgtgtcaggcactgtgctaactcctggggcagggcacagaaagaacaggatgtgtttccctgtcctcaggaagcttacactctagtaggggagaaaggcatagtttatgaagtattgattgagcgccctctatgtgccaggcagcatgcgaaccactggagaacatagagttcctgccctaccagagcttagtgttgtgagggagacagaccaatgagcaggcatggtgtgaaatataaacacatgccagggaagtgtcaatatgtttcttggtaatggctccacatcttcttgtaggctgtgtgaccccacgttggggacaggtcacaaaacctaagccttgtgcctactggaaagaagaagcagtggagtccttgacagaagcagtggtgctggaacctggtgctaggcgctgggccaagcactttacatactgtgtgttatgtaatcttcacagcaatatgaggtgagttccatggtcagcattttacaaatgaggacactgggggctccagagaagttagggaactagccacaagtcacacaggtgggactcaaactcaagcctgtctttccacaaagcctaggttcttattcactactctgataacagtttgtgggttttggggtgaatcatggattattccaatacacctcctccttctccattcccctgtgaagaatcctggccttaagctgggtcgactcagcctcctattagactgaattttctgttgaagatatgagatgaagaggaaaatgcactggtttggtagtcaggacaccttggttctagctcctgctttacctttcacaagctctatgactttggatgagtcattctacccttgggaccccaggggcctcacctgtaaagttcagaggctgacagggatcatctctgaatcctccacgggattttggtggtatttctgtcacccctaaggggctgtaatgacaccttctgggacaaaaacaacatccccttcttgagacgaacataaagccagttcaataaatctatttactttcaaggcgacttgaagaataaatgtccagtgagggtaaatagctggcttcaccttacagatggagtaagatgtgaatatgttcatgcctctttggcctttgctttctgctcatagttctgaacactacacctcctcctccccactttcttagtaaagtgaaatgagccttagtcaagtaaacaagtacccttttaatatatccaatttaattaaagcaataatcaactaggaactgaaaataatccttagtgaaaactgggaaagagccctcaaattaatgggttattgcagggttgtaataatctgagaactttgcccatgctgattttatgctcaggagagcagccccatgacgtgctacaagccgcaaaaagaggatctacccggatcaataagccccataaagctaagagcagagaggctggtttgatgcagaaaagaaggtgactgaggcatggacagcagaaaatgagtctcctgtttagtacttctttcatttcacatcaaacataggaatttagagacaagatctggtcatttgagggtgggaagttaaaagagtccagttctcaggtaagtgtttctcttcctcccttcctccttccctccctctttcctttccttccttcttt

SEQ ID NO: 44563 - DNA, 2300 bp, Homo sapien
ccaatacaactactctctcttgaccgctcttgatcagaaggaagagggagaagaaaaagtattccagtggctgcagcctgctgaaagcatgagtgagatctgggaattcagataatctcagaaatcacatgcaagcattacagaacttacaaaacagtgccatgtggagatcggctgtggtgtgaattggaagacatggtttgctccttggtaaatgatacacaggagtcccagggagattttatcattagtttgctgagaacaagatgtgaaccctttaaggagcccttttctgtagagacaatcttaaagaaccagcccagtgtatgaaattactagagtgtatatatctgaaagcttaggaacttgggtttatgcaaacactcccccgcacccccattcccatcaaaggcagttatttagctgagtgattcaagctgtggcaataacttataaagggtgggggataggtgtggtttgggggacttaaaccacatctgtcttccacccttcatgaaattaaggaggtaattgattcaattcatccacttcactttctctgaagaactgattgcccctactaagtataaagaacaacctttgttgttccccctgttcattagctagccaaatactttgctctttttcacttcgctccccagactactttctaatatggttatatttatgaacacctcactacatggtttctagctgagagattatgcattgcatttgataatttcagagaatatttcttagcagcttcaattagtaactacactccaactgctagcttcctgctcccaaacagtgcccccaccacaaacacatacatataaagcacatggttatgttttctgtaaaaagtagcttctctggctggtactgaggtggttgccttaaatgtgtacttctttcagttgatgtaaacatcatctacatgcccatcatccctggagtcacctatttcatttcttcatctgcaaatgatgattttcattcttaaaagttcttttgtgtcaggagcttgagcagtgatgttctgtattgttttgttttggaataaggcaggttaggttccctttaaccatttctagagagaaaaatcctaaacagccccttaaaagaaaacatggcattaaaacagacagtcaaacagtaaaaagtggttttattaggacatttagagacaaagcaactggtgctgtgcctggatttttcatctcttaaaaggttgttttggctgggtgtggtggctcatgcctgtaatcccagcactttgggaggctgaggcaggcggattgcctgaggtcaggagttcaagaccagcctggccaacatggtgaaaccctgtctctactaaaaatacaaaaattagccaggcatggtggcgggcgcctgtaatcccagctactcgggagactgaggcaggagaattgcttgaacccaggaggtggaggttgcagtgagccaagatcgagccactgcactccagcctgggtgacagagtgagactccatctcaaaaaaaaaaaaaaaattaaaaaggttgttttgatagtgtacagcacagcctggataactgcaaagttggggtttaccacgtgacagagctaggtattaagcccaagtgacctgaatgatcactccttggaggtgacataaaccctgtcgaagtgtaaatgatctgttgcttcaccatctctctgatattaaattttgaggagtgggttcaaggttgtgcttcaggggacacctacacttatttatcatgtaaaacaaaatgcactagactaccatgtgattgcagggggataaatggtttttttcttaaaaaaaattgacaaaacctatatagaccatcctgggtagatatgaaaacagggtgattctaataataaataagacgatttaatagggtctagttggtcccaagattccccaacagggaagaataagcaactgcagagcatttccccagccccctccctctccttatgacaggacacgccaataaaactccacctcctactcttcagtgccagatgggtaagcatttagccaagcatgctgggagacacacagaactgaagcaaaggagtatctggatgtcttggattttcttcccattctgttctgttctgttctcctaataccatctcgttactagacgtaggcattggacgtgacaatcaactgcatttgaactgagaagaagaaatattaaagacacagtcttcagaagaaatggctcaaaggcagcctcactcacctaatcagactttaatttcaatcaca

SEQ ID NO: 44564 - DNA, 2300 bp, Homo sapien
actgcagtcctggagtttcagtagccgcccctatctttataacccacccccctttttttttgttacctcgagtgtttctataacttgcaagaaaaaaaacttgtaaaagacaggttacaaagacagagatgctttcagattacctcagtcattagggagttattctatgaatatgcagggaaatgagaaaaaataggaaccaggcctcacagagaccacagcattgtgcaattataaactgccagttctcacgaccaaacagaatgccattacaggtacaatgtgtgtacctctcaactccactgcctcactagtatagtgactcagtgacccttcttcgctgcttcagctgctcctctcacccgtggggaacttctccacagcaggcctctgttctgccttttaccttccctgggagtatctccttgcttctttgctactctgaccacatccctgtatgttccatactcaaactttctgggagaggttcttactggctcagtcaaatccagtctagaatgcagagctatctgccaggtcaccacacagaccctgggcagcctttgggccaggatggctgggtgacatgggacataagcataaggaaccctttaagtcacctgctcaaaagacggttgtggtagagccggcactcaatgatatgtgcagtagggtggtgtcgcatattatcacctatgctgtgaactcgggaatgaaatgggagcccaataacacattgctgaaaacagctgtatgctatttttggatccaggaaaaaatatttagcaaagtttaagcctaataaaactcacattacctatatcataaaagtgcacacaaattcagttctccaagagttcctgccagaatgagaacttcatgaaaaagaaatgtaatttaaaaaaaaactaacccaaactattaaaaactgttgttatcgttgaaaccatagattcacacaactggtgtgtggggagccaggattttctagaagtagtactcaactgctatgtttagaagtgaaggtcactggaatagtgaaataatttcttctggtaaggttttcccggacctcaagcccgggttatgatatttatgtttacactaatgggttccttattattttaatgaattagtattttttaacagccgctttcatttttgtgcagaaatattggtaagtataaaccacaaacaaacgttttttggggttttcaatgttttagtgtaaagaggacctggaaccaaaaagtttgagaactgctgtcctccagcatctcatatctgtcaggtgccaaccatcttaattctgtctcccctgagctgtgcctgtcttgtcaactcctgggtcgccagagcctcacgcagtgccctgcacttagtaggggctcaataaatacctgcccaacttaaaaatatggaccttttccttttcagcaatgagtgtaattcctgaaaacaaagttctgtttagaacaaaaagtatgctgtgtctttctaaaagaatgacaaagaagcggagtttcccggccaataaagctggtgtttacactgggatgtttacatttatgcttaagtttcaagttcgaagctcgagcgccactgaaatctgcagtacaagaggcaggcaactgctgccctttccatccttcccacggagtcgaactccagccagaggaaggtatgagaccgataaaggagaaggctgacaccagaaaaagaaagttggcccttctacccctcattcgttcattcattcgctcattccgcattagacaccagagccggtgccaggagtttaggctaccaagatgaacaagatccggtgtctatccccgggtgtcgtaaagaaacaagtaaaagacgcggttcctgagcgggggaggggcctttgggcgaaggaggcgcgtcgttttctcgaagccagagaaatttgtcctgtccgccccacccactcccctaagatggcgccctcgcgaaacccgcccggccacccccgcgagggaatattcccacgccttccttccgtttccctcccgggccggccgatccgccggggaccccgcggagctcaaggcccttgaggcgccgcgggatcccagtggccctcgccccgccccaaacccgaccccggtgggcgtcgacgcgcagcagcagcgggtccccccaaccccggcgccccgcctccccgggcctcgcgccgcatgccggcgtcggcgctttttgacgccatagtgggcgtgtcggcgcgacccgcgacgtcgccacgcgccgacaatggcggctgcgtcggcctgagc

SEQ ID NO: 44565 - DNA, 2300 bp, Homo sapien
taggctatgctgtgggaagagaagcaactagaagcttttttaattgatacataatatttgtatgtatttatggtgtatatgtgatattttgctacatgtatagactgtgtaatgatcaagtcaggatatttgggatgtcaatcactttgagcatttttgtttgctttgttttgttttgtgtgtgtgtgtgtgtgtgtgtatgtgtgtgtgtgtgtgtgtgtgtgtttgagacaggatcttgctctgtcacccaggctggagtgcagtggcatgatctaggctcactgcagccttgatcacctgaactcaagcgatcctcaccctccccaatagctgggacaacaggcgtgtgccaccacacccagctaattttttttattatttgtagaaacgaggttttgccatgttgcccaggcttgtctcaaactcctgggctcatgcgatcctcccacctcagcctcccaaagtgctggaattataggcgggagccactgcacccagcctccaccttgagtatttaggtgttgggaacatttcaagtcttctcttctagctattttgaaatacataatacattgttgctaactatagacactctattctgctaccaaacagtagaaggtttgtttgaatatagaagaataccttctatttaactgtagtttagagcctctgttcttcttcctgctcccacccacacacccttcccagtgtttggtatctattctctacccccatgagacaaacttttttcattataatattttaaacaaggagtgactgcattccatgttctaaaatggtcactatggctgtcttgggatgaatggtttagaaaggggtaaaggtggaggtcaggagtccagttaggaggctgtggtggtggtggtcctggggaaaaatgatgagggcttggactacagtgaatgttggagaggtagtgagaaagcacagattggaaagcatctggaaggcagaactttcaggatatgtggatgtgttcctccaacccctctggtgtgtttccttctcacttacaggaaaagccaaaagctgtagcgtggccaatgaggtcctatgttacctggtcctcatcttcttttcccctcactccctctcttctaaccacactggcctgcctttctgtgaacagattaagcactatctcatcttttgaatttgatgttccctcaggtatcaggaaagcaggtgtccatgtggtttttccccctcagggttctgctgaagtgtcaccttatcagaaaatccttttttggccaccctctataaattagcacctagcctaccactccctgttcttctaccctgcttaatatctctttatagtacttatcaccatctggcattgtagatataatgtacatatgtgtatatatacacaaaaacatataacatttgtatgtatttattccatgaggacagggatttggtatgttttgttcactatagaacacaacctccagaacagtgcctggcacacagttggcattcaataaatatttgttgaattaatattgatgaagtagacaaagagaggagcaaacaatggttccaggatttggggcctgaataatggtgccacttactgaggtaatattgaggggtttttaaaatgaggattaggatcccctcctccaaacctcctgccctgaattgctttgcgtattgcagattgagagaagtcctttctccctctttggccaatggaagcctgtgacaagtccagactcctaggggtctgagctctctttttcttcctatggagagagagggaaaaactagagataaaccaaactgactctcagttcctgagactgatgtgacatcggcttgatctaaaccccaaagctgatgttttatttgttgttgactctgtgtatggttttggacaaacaattggcctcccagtttaagagacaatctcacaaaatgctttttttaaaccaaaaagaaagaaatgaaaaaaaaaaaaaaagagctaccatgttcctcattcctgcaggtgcccaaccaggttgacttgttggagtacattttctgcattcttaatagatagctagcaggaaacgccttgtacagtcccagctagaggggcggaaagtaacaaggaggtgggggtacaaatcctcagctcctgcttccgcaagcactaacctgctctgaagtgagccaggcagctctggccatcttttcccagccacagaatcaggtgatggtccagaattaagaggtaagagaatctggggatttttttggggggagaagcaaagaaacttaac

SEQ ID NO: 44566 - DNA, 2300 bp, Homo sapien
aagtaattgtggttttaccattactttcaatggcaaaaatctgatgattaaagatagatagataaatagatgatgggtagatatagctatagatacatgttttttacacaagtagcacatattcattgtgggaaacttcaaaaatatagacaagttaaagcaaaaagataaagataccccagaacctatcacccagacacaagtcttgtggtaccttgcagacttgtttctgtgtgcacatgtagaggagtgtagagcataatcaaagagccatgcggttcctccgcttgactgtgtgtcctctgctgatgaacatctttctgctcaggtcatgattggagcagcatttcaaaagatggagccactttcttctacagaagtgttgtattagtttccaagggctgccataacaaattaccacaaactggggagcttaaaatgatagaaatgtattctttcacagtcctggaggccagaagtctgaacttgaaggtgttggtagggccatgctctctctaaaggatctaggggagggtctttccttgtttcttcctagcttttaatggttgccagcaatccttgatgttctgcggcttgtagacacatctctccaatccctgcctctgtttttgcatggctgttttccctctgtgtttgtctgtgttcaaatttccctcttcttataagatcactagtcattgaattagggcccaccttaattcagtttgaccttatattaatttcactaattacatttacaaagtatttcccccccaaaaaagtcacattcacaggtgccacatgggcatgaatttggggaggggaacactgttcaacccagaacagatatcaaccctactgcttatttgaaactgcttcagatgtggttggttccccgatgtcaggggagagagagggctccaggcatcagccaccctgtgacaaggagtaccaggacatccttctcctcaaagtcagaaaacatcctgatgtcaaagatacgggctattgagttatatgtggaagtgctctagtggaaactgtcccaggtccacgcttaccaagatggcgcagttcaccatggggcactgtgatgaagaaagattcccaactccacttattcacaggggaacacccgtgccacaatagctatcaaaggttgtggtaattgttttccaattatctacctgtgggcaaaaattaacatgggtgcagagcatggaggggaacttttagctactactcataagcactttagggacactctcaacttatttttacaaaactggaactgggccggttgcagtggctcacacctgtaatcccagcactttgggagaccgaggcaggcggatcgcctgaggttaggagttcaagaccaacctggccaacatggcaaaaccccgtctctactaaaagtacaaaaattagctgggcgtggtggcaggtgcctgtaatcccagctactcaggaggctgaggccggagaatcgcttgaacctaggaggcagaggttgcagtgagccgagatcatgccactgcactccagcctgggcaacaagagtggaactctgtcaaaaaaaaaaaaaaaaaaaaaaaactggggacatcctatttctgccatgatatttgcactatcagtgtatcacaggggtccttctaagccagtaatatacttctgtaccaaaatgtatttaactagtaatcctaaatcttttgataaagcccttccatttctcttccacccctgtggtccctgtggtacatcttgtgctgaaagattaccttctactcaaatcttaactattttactgaatctctccacctccttttgcaccccttgactcagccaggaaaaaaatatatatatatatatatttcctgcccctggcgtttccttaatcagatgcagacatggctggatgttctttgctgggctgctgagtcagaagcctggacgggccagcttcagttttaatgaagtggctcaggaaggaagtgctaacagagatgggtgcacagtgcagtcagtgggtgggagctgatgctggctagaagacctgagtcttccgagaggcagcttgattcctggaaaagactactgggctggaagtcaggaggcctggggtactctcagctctgccgctaacatgctgcatgaccatggtaagtcattgcctttctccgagcctcagtgagaaacagcgggcctggccccagaagacactgtgggagaactagaggtcttctgcgtcaggcccccactaagaaggcagtctcctgtgaggatacctaagagat

SEQ ID NO: 44567 - DNA, 2300 bp, Homo sapien
tgagatttatcacaatgaaggtgagattgaaacccatgaaagttcatgaaacccatgaatcacccaatgaaaccatggagaacaagaagagaggggaggagaggagaagggagaaggaaaggaaatagagagaaggaataccaaagttttaagggatacaaagaggaaagaagataacatgaagaaggattctgagaggcagaagcccttaagaatagggtgatatagaattcaagtggggagagcattcaggaagatgacaacaggataataggtcaacagagtaatagagaggtcgctaaaaataaactctaagaagtattcagccaaaactattattgagctaataatggtgggatcaatttcaggggaatattgtgggcagaagtcagactgtaggaggctggggatcaagaagttgaggcaaggaggttggacaacaactgttttttcaagttggtcacgtgaacaaatctgtgaccttcagcctcccctccctcgggtcttggctgagctgattgcagggcccctgcagctctggcactctcaagttgtataaaactgacagtgcagaagtccttgagcccattttggctctcatgataattttccttcagtggaactaaggttacttgtctaagaaccaaagcctctgacttgactgatcaaagttcatcacgtgcatcgaagccacctacttggcagatgtagtgaaaagctacatagatctgggcccaggacaggatgctggggcgtgggaggggaagaaagcaggtgctaactatatagatagcatgcctatcagagcagtttttacgtttcctatttgtctctcaaaacaattttataggaatcatcaaagcaattttatcatggtttctagaccaggtttggatgtgaggtagggatttccacagctgcttttagtttgaaggaaatctgataagatgatgcaaaagcccttcagaaatgtgtaatcctacacacttcagtgattcaattcattgtcaaaacttaaggtgtttttaatattgttattgttcatttggtttttaccaacatgtaaggagttggcaattatttgttaaactcatgtcttaggctaaataaattccaaaaaattcaggatgagaattgtttattgcttaacgtgtttcaaatttcttccatgcacatctttattagatcttcacagcaacctacaggataagcaagacaggtgcaagtgcctcctttgggtatgaggaaactgaggtctaaagagatgaagtgatttgcccaaggctcatagcaatttattggtagagcaaagactagaattcagatctcttaactgcagcctattttccctattctgaactgttacatcagcatcaacaattatctaatggattggaacagtgtacacaggcagcttagctacgtcaagtcacgatttttactttaacttcaattccagagtcttggcctgatttccctcaagaccctacttatctttgcctttgcaaaatttatttttcttgcattatctttccagctaaattttatttaataaccatcagcatgctttttttgctttatgccatgtagacttgacctgaaaacctgccaggctttcattgagtttagtgattaaagaagtaaagttctgagaagcaattagttgatgggacaccagtcataaaatcaatccaaacttttgttgacatgtgtttctttctccatataccaggttcccgcttcgtattagtaagattgaaattgaaataagtctattgctggtggatgaatttgtcactttccttgaaactggtgaacccaaaaagttagacagtgataggaaaatactgccattgtctgttaagaagtctatgacatttcaaggcaagaatgaatatatggaagaagaaacttgtttcttctttacttacaaaaaggaaagcctggaagtgaatgatatgggtataattaaaaaaaaaaaaaaaaacaaaaaacctttacgtaacgtttttgctgggagagaagactacgaagcacattttccaggaagtgtgggctgcaacgattgtgcgctcttaactaatcctgagtaaggtggccactttgacagtcttctcatgctgcctctgccaccttctctgccagaagataccatttcaactttaacacagcatgatcgaaacatacaaccaaacttctccccgatctgcggccactggactgcccatcagcatgaaaatttttatgtatttacttactgtttttcttatcacccagatgattgggtcagcactttttgc

SEQ ID NO: 44568 - DNA, 2300 bp, Homo sapien
cacttaattttgtcctccaaaaatcatgcttacctaaagaaaggttgccaggctgagggtataaagcaatcacatttacagtctcagccacattaagccacattaagcattggtgtgtaggtggggggtttccttttgtctctttgtctttacccccattgctcacctaatgacgagtctgtgtaactcatcattcactgatttgcatcaatactggattcaactagttatgccaaagggtatgagttttttctttgcatatgaagaagaaatccttcatcaaatctaaaaggggggaaaaaacctaaagaactaaaatgcaagtgctttatataggttgctatcaaaggtacacgtgatcttgtatcttcagtatgatggttaatgtatcttcttgaacccactgatataaaaccacttggtgccattttaggaggaaagaaaacttcattttgggcaattgattaaacttagcttcatttcacacaattctgtagcattataagtgatttggactaatgtttaattattaatccttgttgaaagatcagtaattgacgtgtctgtagttgaacagtaagttgaagaccagagtaagtattagattaaaattgccattgttatatgccaaaaacagtccaatattggcagttttacatggcgcaagctaatagaacagcccagtgaaacccacagcatttattataattatggttcttctattttttcttgtataaataggaatgtaaaatgagtctttttaaaaacctgtatttctttctgattatattatataacttgccttgatggtttagtatatttattcctactataggtgctcttaaaatatgtgtacagtgaatttatttctttgagtttccatgtagctgaaagggacagcagagattttatagaaaatataaccccaaaatattatcttacattcatttggaaacagtaacagaactaaccatgtgcttatttttgtattcaatttggaaggcatgctgttaaattactctaagataacctcacagtttcttaagcagtgagatatatatatatatatatatatatatatgtatatatatatgtgtatatatatatatgtgtatatatatatacacatgtgtatatatatatgtgtgtatatatatatatatatgtgtatatatatatatatatatatatatatacacacacatacacacacatatatatagaaagagtattcataccccacatagtgttggcaaactgtaattttttcttggtttgaaatttcagtatgtcatcatgaaattcagttgtatctcttttttccaatccttttaggaataaaaactaatttagtatttttttcacagcaatcttggtccttaaacaaagtacagcagtgcctaggtttcattataagtttgattcactgtggcataaagaatttaattttctctttcactataactccaggagaaattttttgttttttattattttcaagatgttaccttgttgaaaattgagcatatgttagaaatacaattattttgtcactaaagccctatttatgcaaagatagacaaggtaagaggagctaaagcaggggcaccaaccagtagatctgaatctaccaggtcctcacctggctctggtcagtgtgatttggctgcttgctttcccatattctttacagggagggagaaataagctctttctagcattatgttttgatgctttggcaaaatgaaaaataggccttcctcacaaaacctttgggggctcaagcctagagatttagggtagtggatctttctgtctatcaagaacaggcctgggtcatgggattcatgatgaggaatagggactcagtgggaaccaaagagtcagaagccacatcttactttggtcttattttagtctatttcataagaattcctattccattatgttctgctttggttctgtaggggcaatgtcaagatctgaggaagagaaaacagctggagttacagatactgtccgaacctattcaggcatgggaaggagaagatattaaaaacttgggaaatgtgatttttatgtcacaagtaatggtgcagtatggagcatgtgaggtaaggtatttcaaatctcaacattatttcttccatctttcgtatttttcttccttttttttttttttttttgacggagtcttgttctgtcactcaggctggagtgcagtggtgccatcttggctcactgcaacctctgcctcctgggttcaagcaatcctcctgcctgagcctcttaagtagttt

SEQ ID NO: 44569 - DNA, 2300 bp, Homo sapien
cacggtgcctgccctattgattttttaatattcatcttgtattcttcacttccaagaacttattcattagtttgaatagttttttagtggattcccatatggttttcttatacaagagtatgccattggtgaatagagatagttttacttcttcctttacaatctggatgccttttatttcattttcttccctaatttttctggctggaacctctggtacaatgtttaatagaagtgatgagagcagacagtctttcaccattgagtacgatgttagatgtgggtttttggtaaatggcctttatcagattgaggtttctttatattctgagtttgttataagtgttttgttttgttttttatcatgaaaagagttggattttgtcaaatgctttttctacgtctgttaaaatgatcactggtttttgtttgttattatatttgtatgctgtattacatcaattgattttcatatattaaatcaatcttgcattcctgggataaaacccagtagatcatgttatatatgcacatagaaatttgtgcacatcagtgattattcttgaaggatctttcttcacagaaatgggattactgtgtaaaattgtgatagataatgtcaaattgcccttcaaaaatgttataccaagttacactctcagcaatagtgtaaacagtgtcttcttcctgtccctggcaacactggatattatttgtctttaatgtttgctaaactgatggatgaaaatggcatttcatttattgctgtaatttgtatttcatgattactaatgagtttggacatcctcttatccctttatagtctatttgtatttcctttttgtgaaccaaatatatctttcttactttcttacagaatggagaaggcagggaaaatactcaggtcccaagtgaagtttccagaatatatggaagaatcctcctgtctaggtagagggtcactgatgtctctcaacaacacaagttctagcaatggcagttttatttttgtgttgcccctgaagttgctgagagttggggacacctacaattcttccgatcagtcaagaatggcctgggtagtacctctttgattgcattgtcctggctacaactacatgaccgactggtctctgaaagctctaaacctatggttttcctgttagccaaccctttcctctgccttatccccagaaggtaatctgcctttgtcctcttccaccattactaccaacccattgccagggacaccctaccatctcctattctgctcctgagccaagtttattatttatttatttatttttatttatttttgagatggagtctcgctctgtcacccagctggagtgcagtggcgtgatctaggctcactgcagcctccacctcccgggttaaagtgattcttgtgcctcagcctcccaagtagctgggattacaggtgcccgccatcatgccccgcaaatttttgtatttttagtagagacagggtttcgccctgttggccaggctggtctcgaattcctgacctcaagtgatccacctgcatctgcctcccaaagtgctgggattataggcaggagccaccgcacccagccccaagtttatttttttttaaagatattttattctggaaggatttcactgaatgtatatgagattcaattagtacttatttcactttctttcttcctccttccctctcttcctcctctctttccccctctcttactctctctccctctctttctccccctctctctttctttctttccagtaccagctggtagcagtatgtttttttctctgcccccaccccctcattccctcctgtctccctgagtcactccatctgccttgtcaccggaacagcaggggtgccctccccaaagtgaggcttgtgggatggacgatttgccatttcccaggggctgctctgcagggaagcagttctgaaagtaaggcagctctactaatgatcatgagtcaagactaaatatctagcagcgcggtgcctcctgggaggagttaggcacaaggcccggcctaaccactacaattaccagtagttgtaacgggtatcagcagatcttgcttcaagccctgaccctgccacttgtgtgaagtcaggatctcctttcccaggcctcagttgagtcatctgtaaaatgaggagactagagtaggggttgggtaatgtctaatggttgtaatgtctgtttttaacttgcccatttccatcagtttccgctaggcaaagctttgcatatttagctgctcagttggaactagtaggaaga

SEQ ID NO: 44570 - DNA, 2300 bp, Homo sapien
gcttgccactgccctggaattccttgctttgttgacattttaccacaccaactgtaacttccaatctttatacaaatagaactggttcttttgccttgaggcagtggccttgccattctgatatactttattactcatagtaatatttgctatagtgagtgtccaaaatgaggcagagttttatccagatgaccttggtgaactcaagactgttttggaggaggctgggttcacaaaacttactcaggctttgttcttcatcagaagatgtaagtgatacctcaataatactgccagattttgtttgtctgtagagtaaaattttgatgagcagttgtgaaaactgttcagatgacatataaaaatgtgtttaagttcgtcagatttgggaattttatttatcaacaaatgtattctgtttttatttccattacatagatttggccatgggtcaacgtcaatgaaaacttttgattgattatacttattttgcttaagtcacaagtacatcaagcaaaccttgttatagaactatggacagacacaataacatgaatgagtatgaaaatgatgatgttgagttaagaagccagaaaaaagatagtaccatactgtgtacttccatttatataagattcttgaaaatgcaaactaatctatagacactgaaaatagattggtggttgcctggcatttggaggcaaagaggaaagaaagaattgaaagggcacgaggacaattttgggggtgatggaaaggcttatctggattgcatttgtgtgattgtatcaaagatgtatgtatatgtcaaaattcattaaatcatatatatgcagttccttatgtgtcaattacagcttaataaaatggtaaaaatcattaacaagaaaaaatgtttgttttaagccatttaaaccaaccaacaaacaaaaaatccttgctataatcagttactgtctatatcagggacaccatctgaatacattcatttattcattcagcattttttaacatctactgtgtatacctggcagtctgctggtaacacagtgttaaataaaaaaaaacaagaccccgagtttaggaagtttacattcttgtggaggagtcagatcatcagatcaacaagtgataatagtaaagtgtgacaagtgtcctgacagagcaagaaagggcagctttgaaaatgtttagtagggttatctaagctgattctttggtagtagatgcctgaagctgtgttgaaaagaattctgaggcttagtaggaaagagctatacatgatctgatgtctcccatgcacgaggagaggtaatcatggtaagtgccacacatttgccaacatagggttatactattaaagttggccttatcataaatttcccaatagtatgcctatttcaagtggttctgaaaatgtttgagaatgatgaagatctcttgttatagacagtttttttttcagagcagtattttaagtgcaaagtgtttttttgttgttgttgttgttgggaaaataagaatcttccatattgtagtgtagacagaggacaagtgctcttttgttctcaaacattctattttttcaagtgtattttacccacttatgtgactgagtctgagcctttgctaagggtactgcagctggattatgtagtggaaccaggtccagaaaaagaattgctaaagaatgcaagtaaacaggatgtcagatgttatccttagcctatttccctaaacatagctttttggctgcaaagtaaaatgccattcttctagcttctgcttatacacagtgatggctgacagcaggcataatcttcgtttgcttggcacgttgtcaccatgcaactcaacgtgttttgcaaggaatgatcgtgacacaccatctctgggagatactatgaggacatccggctatttcttggaagaattttctgtctaccttctttgagccctgttgtgccagcacatctccccatgaggctcagatctgtctgacctaagagccagttggcatcgtcctcctaacagaagccagattttcactggggctagactatttattgacagtgttttcccagactggcccatgagtgtctcatttccaaggtcccctgaagtgctggctcacctctgtttcccaaagcacttgcttgcttgtctctcctccctccccagcatccttttcactttcttcccttataacttcttgcactctgtgtgcgtgtgtgtgtatgcgtgtgtgcatgtgcgtttcttctttttttttatcctaacgaatttgttttgcaggtttt

SEQ ID NO: 44571 - DNA, 2300 bp, Homo sapien
gtgaccttggtctatctgcatcagaatcaagtgggatactttgataacacaaattcctttttcccactgcagatcttctgaactggagtatctgggaagagagctcccaaatattcttttttagtaagtgccttagtagatttgaaatgaaagagaatcggttagtaacattttaaacacacaaaactaaatagtaaaacaggtaccagtgtacccagcattcagtcttaacaaatgttcacatttgccttatttcctgaagatcttttgatttttcatgaaatgttacctattttagcttaagttccactctcaccttcctttctcctttatgcctcacaggagatgatcatatgaacattgttttttgtcaattcctgctttaggcaatagagagcctttgagggtttttgaacaggggtattaacactagaggtgtttttggaaaatcaacccaaatgtgccctgttagagagttcattaggatgagaggatggaggtggaaagcccttgaagaggcaggttcagtggcccagagggtgtggtactgaggatctgaggtagggtgagagatctttgcttttttttctcatgctcttgtgtgaagcctgctctttgtgttgctgtgacccccagtctttgaattccccctcttcccctattccctcagttcatcagctcctttctagcttcatttgagtccctaaccagcctgggtttcatgggtacccatttcacctatatgcttgccactgccctggaattccttgctttgttgacattttaccacaccaactgtaacttccaatctttatacaaatagaactggttcttttgccttgaggcagtggccttgccattctgatatactttattactcatagtaatatttgctatagtgagtgtccaaaatgaggcagagttttatccagatgaccttggtgaactcaagactgttttggaggaggctgggttcacaaaacttactcaggctttgttcttcatcagaagatgtaagtgatacctcaataatactgccagattttgtttgtctgtagagtaaaattttgatgagcagttgtgaaaactgttcagatgacatataaaaatgtgtttaagttcgtcagatttgggaattttatttatcaacaaatgtattctgtttttatttccattacatagatttggccatgggtcaacgtcaatgaaaacttttgattgattatacttattttgcttaagtcacaagtacatcaagcaaaccttgttatagaactatggacagacacaataacatgaatgagtatgaaaatgatgatgttgagttaagaagccagaaaaaagatagtaccatactgtgtacttccatttatataagattcttgaaaatgcaaactaatctatagacactgaaaatagattggtggttgcctggcatttggaggcaaagaggaaagaaagaattgaaagggcacgaggacaattttgggggtgatggaaaggcttatctggattgcatttgtgtgattgtatcaaagatgtatgtatatgtcaaaattcattaaatcatatatatgcagttccttatgtgtcaattacagcttaataaaatggtaaaaatcattaacaagaaaaaatgtttgttttaagccatttaaaccaaccaacaaacaaaaaatccttgctataatcagttactgtctatatcagggacaccatctgaatacattcatttattcattcagcattttttaacatctactgtgtatacctggcagtctgctggtaacacagtgttaaataaaaaaaaacaagaccccgagtttaggaagtttacattcttgtggaggagtcagatcatcagatcaacaagtgataatagtaaagtgtgacaagtgtcctgacagagcaagaaagggcagctttgaaaatgtttagtagggttatctaagctgattctttggtagtagatgcctgaagctgtgttgaaaagaattctgaggcttagtaggaaagagctatacatgatctgatgtctcccatgcacgaggagaggtaatcatggtaagtgccacacatttgccaacatagggttatactattaaagttggccttatcataaatttcccaatagtatgcctatttcaagtggttctgaaaatgtttgagaatgatgaagatctcttgttatagacagtttttttttcagagcagtattttaagtgcaaagtgtttttttgttgttgttgttgttgggaaaataagaatcttccatattgtagtgtagacagaggacaagt

SEQ ID NO: 44572 - DNA, 2300 bp, Homo sapien
tagttccagctacttgggaggctgaggtgggaggattgcctgagcctgggagttcgaggctgcagtgagtgtggttgtggctctgcactccagcctgggtgacagagggagaccctgtctcaaaaacaaaaaacccgaaaaaataaaaaaacaaaacccaccaccacaacagacagacccccaaaacaaaaaaaacctgtcataactcattcctggactactcttatgtagtttgcaggagaaattccaggtggagcatcagctgaacatttatctaaattcataaagtcatgtaaactgagtattacacaatacatcatgactacaaactacaaaataggcaatttaggcccctttttatttattcatttatttatttattttgagacggaattttgctcttgtcacccagactagaatgcaatggcacaatctcagctcactgcaacctccacctcccgggttcaagccattctcctgcctcagcctcctgaatagctgggattacgggcgtctgccaccatgcccggctaatttttttgtatttttagtagagacagggtttcaccatgttggccagactggtctcgaacttctgacctcaggtgatccacctgcctcagcctcccaatatgctgagattacagatgtgagccactgtgcccggccaggctcctttttaaaaatgaaaaaaaatttctattacaggcttattttgagcattttcagttagatgatagctttatttttactcgcaattgatagcaacagaataccttctcaagtatctataggcaaaatatgttacttgtgtgatgtttgcatcctgaagtatacttcgacatatgtgagttcacatgagataatgaaaccactgtgacaagatcctggctgatgatcaagacttggatacttttcatatttaaaacatttacagtagggagccgggcgtggtggctcacgcctgtagtcccagcactttgggaggccgaggcgggcggatcacaaggtcaggagatcaagaccatcctggctaatacggtgaaaccccgtctctactaaaaatacaaaaattagctgggtgtggtggcgggttcctgtagcccagctactcgggaggctgaggcaggagaatggcgtgaacccaggaggcggagcttgcagtaagctgagattgcaccactgcactccagcctgggcgacagagcgagactccgtctcaaaaaaaaaaaaaaaaaaatttacatcagggaaaaaagcaagaacatacagagaagcaacaccatttcttttctttcttttttttttttttccagatggagtttcactcttgttgcccaggctggagtgcaatggcgtgacctcggctggctgcaaccttcacctcccgggttcaagcgattctcctgcctcagcctcccgagtagctgggattacaggtgtgcgctaccgtgcccggctaattttttgtatttttagtagagatggggtttcaccatattggtcaggctggtctcaaactcctgacctcaggttatccacccacctcggcctcccaaagtgctgggattacaggcatgagccaccgcgcccggccggacaccattctttttcaatgaaacagtctaattccagagaatgagacttccagtttgaatgcaaagtgtgtggtcccaaagttgaattcttttgaacccaagtacatgcctgcggttgggaggaacacttaaagatgaagcaagttcggaggaaagtgttaactgaactacagagatggtcactgataaaacaagttcttagaagttctcagacacacccagaggtgaagggcagccaaaactatcaacacaatggaaaaatgagctcacccaactgcacacacagagcttctagaagggttaacagctcttgccataggttcctggttgtagtttacaatatctgcctttaccaccctctgtgactgttctatttctgctttgtttaatttgattccaaggatttcagcaacaactttttgaaaacacaggaagacagagtctcttgccttggctgaaacaaagtggctattaaaaccattttcctggcaaaaccgtaagtgtttttcaggttttactgtttgattatgctccaaatcaattttattgcccactaaggtaaccagcggctgagtttctgactcttcactcactttcttcactaatcttctaaaaattctcaaagctttgataacttgtaataccatataccaagatgatttcctgtgctccatagatggatctgtccaacattttgcttct

SEQ ID NO: 44573 - DNA, 2300 bp, Homo sapien
tacccttttgtgacctaatcttctccccaaatccccgcctcctaatgccatcaccttgggtattaggatttcaacatatgaatttgggggaggacacaaacatttagaccatagcaccattaaacacgatacctatcatattcatctaacaattgttctttcctccccgtgtccactgccgccaccctgattcaagccaccatcctctctttctggtctgctcccacagccctattagtgtcctttttcccacacttaccccctacagtcatttaatgggctcaaaggtcctgccaatcttggctccctcatttcatgcccctcatattcttgtcacctggccctctttctgtcccttgatatatgccaagctcttcctctctactttgtgtttactattctcttcttttcctgaaggtttttccctcagctgttcccatagctagtttcttttcttccttcagctctgatctccaaagtcacctcttcacatagaccttccctgatgttttaatcaaatttgttctccctaatattgtccatcaaagcaactagtttatttcctccctggcattaatcacaacatgccattcttttgttaattgtattcaatttctttaagaaaaaaattaaaaaattttttggtttcccccctcaacaagtaggatgggcagatgaaatatagaatgctcagttaaatttgaatttccgataaacagcgaatttttaaaatatgagatttgggacatactatactaaaaaaagtattcgttatctgaaatttaaacttaactgggcgtccctttttttttttttagacgaagtctcgctctgttgccaggctggagtgcagtggtatgatcttggctcactgcaaccgccgcctcctgggttcaagcaattctcctgcctcagcctcccgagtagctgggactacaggcacacgccgccacgcccggctaatttttttattttttatttttattttagtagagacggggtttcaccatgttgcccaggctggtctcaaacccctgagctcaggcaatctgcccgcctcggcctcccaaagtgctaggattacaggcatgagccaccgcgccccggccgcgtcccatatttttatttaaaattttttaacagcttcgcagaataaattagcgtcccgcattttcttttttattttgagacggagtctcgctctgtcgcctgcccaggctggagtgcggtggcgcagtcttggctcactgcaacctccgcctcccggattctcctgcctcagcctcccgagtagctgggactacaggcgcgtgccaccacgcctgggtaattttttgtatttttaaaaagagacggggtttcaccgtgttagccaggatggtctccatctcctgacttcgtgatccaccgaccttggcctcccaaagtgctgggattacaggcgtgagccactgcacccggcctggtattttcatttattaaatccggcatccttacccacaggcctgactcttgtcttttccctggagttgtattttcctggcctagcccagagcccaccatttacaaggtgctcagtaattgttctatatgaatgtactatctgcatgctgttttgtacgttttttactcatctgaaatttacatgtatttatcagaaattcccacactcactaaaaacacttgttaaagacaatttttgaaaatatattatattgccaaaacttctttgttttccgtttctgcaaaattggtatagtaggagtatctaccctcatcacattttgacaattagaagagttaatggaaaagtaaaagtaaagttttgcaccgtgcccggcccactaggacgctcaataaacttcagttctttattaaaggaagcctgtgcaccattttagcgtaaagcaaaaaaagcgcgtttgtaaagaacgggtgggggtagagaaaacggttagaaaggtctgtcgacccaacaccgagggcccgggaaaaagggaggagagaagggtgaatgacagaggagccagccaatggggagactgggaactacttcccccctccctttgcgtttcaaattctaagctccgtttccatccgggtccttcagcctcgttcccgggcagtataaagtttgctgtctcctttgttcgccctcgttgcgcagtagtgctagcggcttcgcggttcggtcctcgcacccggcagccgccactggtgctgagctgctaggaagcccctatcgccgagctcgttggagcttgaacccattgtcacccctccggtacgtgtctcctttc

SEQ ID NO: 44574 - DNA, 2300 bp, Homo sapien
atgtaaagctcacaccttcttgtggagcggcgggccctcctaaggtttgcttccttggcacctggaggagctggtatccaagctccaggactaggcctgggaggctgtcctgttttttttattatacacgttttcaaccaaaggcagaccagagagccatactaatgcagcggtaaagcacagaatttttatccaagctctggttacttccaaccgtgaccgctctcacgcttgctagctccaatttcccattcctcttcacaaaggatgtgccctggcaatcatgctattctgccctgcaaatcttgacatgggcttctccactccttttgatcaagttcaaccttttcactctcacaattcccttatttctcatcattcgcatatttcctttcatttctcctacaactttttcaacatctctagtccaagagttaacttgatatatttctacacgcctcggctcaccgccagcacgatgcctttgttgtcttgaatcgccgcctgccaatcaccaggagacacagacctctaggagcgagggaacttggacagaaaggcacttggcaaggcgcacacgactcagcgtaaacaagtgacctcttgttctccaaagctcttgaaacacaagaaggaaaaataacaagctcttctactatctgtgtcctatcatacctacaatactctcttggtccacatgcaagcactttgcattatagtacaccacaaggagaaaaaggtaagacaggattcttaacagaggtcgtaaaataaggtccccgccgctaagagaaagaagactttcttccaatagcatagagcaggactccacctccacctcccttttctttagtcttttgcccttccatcctccttccaagactagcgttatccaatagaaatataatgcaggtcacatactatgtaattttacatttccaagtagccacattaaaaaaattaaaagaagcaagttaaattggttttagtaatgttttattcaacgcagtggaccccaaatattatgatttcaatcacccatgcagtaattagaaatgttttctttttcttttttttttttttttgagacggagtctcgcttgttgcccaggctggagtgcagtggcacgatctcggctcactgtaacctccgcctcccgggttcaagcgattcttctgcctcagcctcctgagtacctgggattacaggcgcccgccaccacgtccggctaatttttgcatttttaagtagagatggggtttcaccatgttggtcaggctggtctcgatctcctgacctcgtgacccgaccgcctgggcctcccaaagtgctgggattacaggagtgagccaccgcgcccggcccccctcacgctttttttttttttttttgacggagtctcgctctggtgcccagactggagtgcagtggtgtgatctcggctcactgcaacctccacctcccaggttcaagcaattcttctgtctcagcctcccgagtagctgggactacaggcgcacgccactacgcccgctaatttttgtatttttagtagagacggggtttcaccatattggtcaggctgggctcgaactcctgacctctggtgatccacccacctcggcctcccaaagtactggggttacaggcctgagccaccgcgcaggtcgaaatgttttactttctttttgtctttggtagctggagtgcattttacacttacagaacatcaaactcggaaaagctgcattttaagtgcctcataggcaccgcactggaccgtgcggccctagaatgccacaccccctaattcctgcagccagaaatgaagatggcaggggcggtaacactgctagtttgggactaagaaaggcaacctcgggaggaggcgagcccctgctatgatgaaacttctaggacagcctcccttcgccccccccaacctgtgcagggcctagcgtggctgcaagcgaggcagagcgcaaggcaccgccagagccacgggaaagggcgaggcggggaagtctggggatggcggggcggggcggggcggctcggctcggcggggatccccacgcatgcgcaccgcgacagctcacgatgcccgcctactggcgccctagcaaccgggttgcgaaccatgttctatcccgactaagtggccgtcctgggagttatagtgccactagccggcctcggctgttccctgtccgaggctcttgtcatttccgcttatttcctccacgggtgccgatttcatgtgtgtgttcccgagtgcctgagccggctcccgaaatga

SEQ ID NO: 44575 - DNA, 2300 bp, Homo sapien
ccgtggcccccagcacccggcagggccccgagcctgggagcccacgacgccccctctgaagcgtcccgacggctgctgagctaccaggcgcggtggcccgcggtgcggccccttctcgcctttccctagccatcctcccgccctcgcgttttctctctcactttttctcgtgcgttcttttcccccttcctctccattctctcgttttttcctcatcctttccctcttcctctgcttgttctcttttcttattattttttgctttttctgtctgcgtctctcccagtctgtcttgctctctcattctctctcactctcacgctcccatttcttcttttttctttctttctccctctctgttgctcacattctctctgtctctctgtatgtatctcattctttcgctgtctctcatttcctttttgtctctctgcctctcagtctctctcgccctgcctttctgactctctccaccaccctgcacccctgcctcttttgcctttctccccagctcctttcccactcccctcggctgtcaccgacaccaagcagatccggagaaagcaaagaggatgccaaattgggaatggggatggggctgtggagggtgagggtaggggagctcaataggcatcctctctgcattttccagtctccattgcactgctgataaactaagggttttttaaccaaagcccgcggtggccggggcggcaggtggtttccacggcaaaataaagtccacagggagacagagatccaaagagacagagatccagccagagaaaaaccaaggtgaggggccatgggaaaaagatgtagagaaatagagatgcgcacacactcaaagatacaaagcaagtgtttagccagagtcctggggtgacaggaaagtgaaggacagagaaaccaacgagagagtgcacacactaaagagatagcttgagagacaggtgagacaagcagtagagtgttagagatcaatggagagagaggcagagtaatgcagagagaacttaggcagggagagacagaaaccacacggagagacacagagacaagagggtccgagaaagacagagcaagcgcacacgtgccagtgagagacagaaggagacacccagagaacccgagggagacgcagaaacaagagagttggagagacacggagacgggcagagacacagcgaacgacattgaacaggtgcgctagggacccacaaagatgaactgctggggaaatagactgagagagaaatggagagacaagagagcactagggaaagacggagacacacatgaactagcgagcgacacagtgacaggcagagacacagagagacagaatggatcagaaagagactgagggagagacgggcaagactgtgagaaagatagggagcgagagcgcaagccctgcagagaaagtgcgctagcgaaagagacacacacagagagactgagtgacaaacagagtggaagagataaatgagagtaacaggaaagagacagcgtgcacgtgctatcgagagacggagaaacagagacagacataagtgagagacaaggatgagaaagaatcaggaaacggtgagacacatacagacacacaacccgagagataaagaaaaaaagtgcgctagcgagagacactggagaagagacagaaactgacggtcgtaaacagacagaaacagagagcgcacgcgcatgcgctagcgctagcgaccaaaactccccggagccagagacagtgtgagagacaagcagagaaagcgcacgcacgcacgcgccagcaggagaaacagatgagaggaaatcagagccctggagagagacaggcagacagatctggagagtccggaaaggagccatagaagctgcccgcactggggatggagccgtgcggaaacccggggtagggggtcctgcagcgtccttgctgggcgcggaggcttctccccttgacgggtgactaactctgcctgcgtgtttcttttgtcaccagcataggcactgagtgcggtctgtgcacccctttgccacccaccggtgccggcactgagcctgcaacctgtctcacgccctctggctgttgccatgacgtccacctgcaccaacagcacgcgcgagagtaacagcagccacacgtgcatgcccctctccaaaatgcccatcagcctggcccacggcatcatccgctcaaccgtgctggttatcttcctcgccgcctctttcgtcggcaacatagtgctggcgctagtgttgcagcgcaagccgcagctgctgcaggtgaccaa

SEQ ID NO: 44576 - DNA, 2300 bp, Homo sapien
aggaaataaaggagaaagtgaaaagaaaggtggggcgggggggggggggggaagaaaggcaatcctccttttttgtaaacctgactccaggggattcatttgcatgatttaagcatatttgttctctgaacacaccagcgcccccctacccccccaaagaaaccctctgctgagaggcactgaaaccattcttggagagcctatgttcggcagacgcaataatttaagtcagcagtgaactcaccttccaacctggggagagagctctggatgtggagagagaattggggcgagtttgatgggagggggtgaatacggtaagatgtgctaccggtagggtgttctcccagcaaactggctaagaaagaaggtgaagtgttggctgggccaggcagactggggagcaggaagtgaaaggctgcagttataaagcgctgcttaaggcggtctctcctggcgcctctgaacttgatcagatgttctatttcctacagagagatggcggccaggctgtgaggctgcctcaaggcgcagactttggggcttggcccagctagggatgtgacaatcacagccatctttctctctgccttttctttccactctcttctgcattctttgcaaatgccttgcaggacacaaaaatgagtgaatttatagccttgtctgaacctggtcattatgtcagaaagaccttgcaacagacagaaggcgagaggactttcacacacacccctggaagtaaatccttaaggggtaagcagtccctgaggtcactacatgctttaccttctccgggtaggagtagaagagagtaaagccttggctgttcagaggaaagaaaattccatgtcacagtccccattcagcatcagcaacccccaacacgacttttgcatttgaaaatgttgagaattcaaagctgattagcctagtgatttggaaaccaccctgatactgtgtgtgtctagtgtgtttattatgtgtttagtgtgttgtgtgcatgttttgcgtacactggctaaaagtgttctttgcatgttttgtatttgtgggtatgctcgctgttatgtgtatttgctctgttgtgtttagttgtgtttctgtgtttgctgtgttgtgcgtagtttatgttactgtgttgtatgtgcttactttgttgtgttgtgtgcgtatttcatatgtcgtgtttgtttcctgtggtgcgcttgtgtttactgtgttgtgtgcttgtttcctactgtgtgcttgggtttactgcgttgtatatgtttgctgtgtcgtgcccggtgtgtaattcgggaagtgggcagcggcgagtacggccgctgctcacaaactaaagggtcaacgcttggcgcagacggaagtaacggagatcagctctaattgtaatcgtttcttctcctttgggtctcggacagctgccgacaggttgggggcacaaacggcgaactatcccggcctgggtcccggcctcgaggccatcagaactcgcagtgattggaggtggacgcagcggctggaccgggagcgcgaaactgctgcgctctccccaggatctgcgccctgcagctacagaggggacatgttctcaaggtggtgaggcagcgggggcccaagcaggactggacgttgagcgccgcgtctcctccatcggcgcagcagtgggaccgatcctcgcggggcaaagagcccgcgaggggtgggggaaagcccgcgagagtcccggcggcgtcccgccgtttgccggctggagcctggccccagttccccgcagccactcaagcccggtggagcccactcgcggccgcccggcagccgccgcctcacctgccaggcacccggcggctgcccaatcagcgggggtcgctcggccgcggctgccatgttctccgctccgcgctgccaatcagcctcgcggcggccaatgggcagtccggccggaggtcaggtgaccgcgggccagctggctccccattggcgcgcgcctcgcggcctcccgctcggtttatgtgcgaggagtgagtgattgactttatcagtccaaggacattactctggaggcgaagaggctgggactcgcgcggcgagcggcaagcggcgagtaacgagcctgcctactgcccgctgcccgcctgcccggccgctagccggctccgccacttggcgcagcccagcccggaggccggtacccagggagcctcctggccccgcggttctgtgcactcggggagaggaggggtgcccgggacaggattggcaaactccgccctccacttactattttgcttattttt

SEQ ID NO: 44577 - DNA, 2300 bp, Homo sapien
ggtggtttgctgcacccatcaacccgtcatctatattaagtgtttctcctaatgctttgacttcattatttctttcatttgattgagtatgctgtggatgttttctgttacttttttaattttattcattgtattcttcagcttcagaatttgtttgtttgtttgtttgtttgtttttcacagtttctatctctttgttgaacttattattttggtcatacattgttttcctgattctactgacttctttgtctgtgttctcatgtagcaacccaagcttatttaaaacaattatttttaatattttgtcaggaaatttgtagatctccatttttttttgttggcaactggaaaattactgagtttcttcggtggtattatttttgtgttgtttttggcaggtgttccttgaaatctcgtgttgccatgttcacatttgaagaagtagtctcctccttcagcctatactgactggcttcagaagagaaacagttataccagttagcctgactggggatactaagactcttgcacatcttttctgtagatgtgtcactcaagctctttttgagaaattttaagatcatctgtattttcttaatttcataaaaccaaaccaaattctgagagtttcccatttgttttctctaacgtggtgccctgaagtgctcaagtttttgtgccttctcccattcccacagagtcaagctgcctgcttctgcatgcacacaagttcacactcgctgtcagggtttgggccgtgtgcagggagcaagccaaggtagaggagagagggagacatgcaaagttttgggagcacccatgtgtcagcttcgggggtttacagttcaggcatcccaagccactagtgggtgggcctcctgatggagtctgtgaagttgttagtagtatatgtgtccttttgttgaatttccagtctctggttgctgtgagcccctaccgctgttccctgctcacagcctctcagtcactcagacatgatgatcccctcagtattctgagtggggatagaaagaagtaggcctcttggtcagtgtcccacgtggctaggaaagccaggcattcatttactacactctccctttcacccaatggagaaatcatgagtcaaagttgtatctcttggtgttgagttctgctagcttgagagacggttgacataagtagtgaaactattttctggttcttttcaatgtgcctattctcgtaattgttttgctccatctgtgagctggactaccagactcccacaaaggtactctcatacttgagtggttgtcaaaattgtagatagtggggaaatgacaggagaaaattcctgttctgccatcttgctgacatcaccccaatatctaaaatgcatattttaattatttttttccttgaataaagtttattttggaattgttgagttttacaaaataatttaaaatattctctctctctctctctctctctggggttgaggtctcactctgtcacccaggatggattacagtggcacaatcgcagctcactgcagcctcgaatttcttgggtcaagtgatcctcccacttcagcctcccaagtagctgggactacaaggcgtgtgccaccatgcccagctaatatttttacattttttgtagagatggggtctcactatgttgcccaggtgggtcttgaactcctggcatcatgtggtcctcccacctccacctcccaagtcctgaggataccaattgtgagtcactgtgcccagctatccccttctcactctctttttctctcacacacatgtgtgcatgcacagacacacacacctcatgttcattctctttaccatgatgatccttggttcttttacacagcttctttcagtttaccttacaatttagctcaacacaaattttaaaaaacttatagttacaatttaatttggcttggtccacacctctaacaaatttgatacaatctccaacttacggttgcaagttagttgattatattcacttccaagtatttcccccaacatttcattatgaaaatatatccatcaattaatgctcttatctataaaataattatttttttgcatttcaaaataagttacagacatcaatgcacttcatctttaaaccctttatcatgcatatcaggaagtagagtttaatatttctatatttcttgggggagaaatggagctaaaattatatactgtatcatatacaaacctgttaggtatatcaattcatgtgtattgacaaatgcgtgcaccatgtaacagaaactcctttca

SEQ ID NO: 44578 - DNA, 2300 bp, Homo sapien
ttaagaatggcaaataaactgcatgctcgcctgaaggtctgccttgacgcaacctgacacctagagctgaatttccagtcgctggaatatcgcgctactcctaccactgaaaatgttcaaaagcaccacagtctgggtatgagcttaaatcccctcttcaacaccgcattttagtagcatgtaaccgattacactaagtctaaccaaatctctcagctctttgcaacaaggttctagaaatcccccctccccccgccccagcaaacatttcgaagctgcaccacaagtcaagtctgtcccaaaaagcttaaaagtcatcaaagaaacgcaatgcctagacagcagaagcccacatcccttggaggtggaagctggaggggaagggtctgaggcagagataaaagcaagagagggattccccaggctctcctggggacgggaggatggtgtctgcccagctctgcgcctgcaatttccacgccatacatatcacagccatgtctgggtcacgcctgcccagagcccaccgggcatgcacatatgtgacatgtccgaagctgagggcaagccacccagggcagagtatgcccccaggctctgcgcctgtcccagggcagttgcaatgcagcaagcgtgttactgttacggaggcaagaaagccagcgccttcccacgcacgcacacaggctaggtggcctcttctgcacaagatgggccaccaacaaactcacctatgctacatacctgctccccaccgcccccacctcactcgtaaagtatggggaaaagaaagcaaaagccctttccgacctggtcttcttctgcgcctcttcttggagccgaagagtttgacccgggaaaagacatttaacttgtttttgtcgcagctggtcttgcctttgctggggctgctgacacacttgcaggcgttggatttctcgcgctcgcgggcttgcctcttctgacggatgagcgagctggcgatagccgccgccatggccacgacgcccaccaccaccgcttcttttgctgcccctctctgggttcgcctcctcctccttctcctccgctgcttgtccgctgtctcgcgacttcgccgctttggtctccttagcctgcgtttgcccgggcttctccgcactcgggcttcagccaaggagggggctcagcatgccgtccgagctcctccggcggcggtccggctcccgcgcgggctgctggctgcctgggtcggagtcgacgccacagccccgggcccgggatcgcgggcgagactggcacgcggatgctgaactgcgcgactgcgtgtggtcggcccctgcgcccggcggacaccgtgcatgtccagctgctccggtccgaatttcgccggaccccctcgccctgttgcccttctgatgggggccagaggagggaggcgggcggagggagtgagcgcgggcgggagagaggccgggagctcgggcggccggacggaggagggacgaggcagcgcgcgggggagcgcgccctcgccctggcccctccgagtcttcgactagtccttgcaacttcttggcgtgataatcgggaaaagttggcccgtgccaggtttccgacagggatcaaacaggtaatggcctcgcatcttcgctgttgctgctgctctgggcgcggcacagtcgcagcacaggaattcagccgccgcaggcaccctccggaacagcgcgacagcctccttgcagccccctcccgcgacggcccctccctcccggggctgagcccgtaggctcggagccgcaggccgcccctcccacccccacccccacccccacccccccaagtccccggccgcccgttccggctaacacctgtaggggcttccgcactgccccagtcgtccaaatccttctcccctccttttcccgaaaggagcttcgggaggaaacagtgatggaggaggaactgagatgaggtagttgggctgacggagcgggggtttgctcggcattgggggatggagtggtgggggtgtttcctcagtgtttgagctgaccagattgtgctcgggctggagcccctcagaagttcgccagatccctgcctcaggcttggacgcaccaacaacccggagaaccctcacccacccgcgcagaggtattttgcttggcgacacttgtagccattcaggggaggaggccagagtccccagacgggttcagccccagcggtagcagcagaagcagacactgcagagctgcgcccgcacaccacgctgccacccagtggtttttgctgacttttcatttcaagccaatttg

SEQ ID NO: 44579 - DNA, 2300 bp, Homo sapien
accacagagtgtccacaccaataattctacaggcgtcctgaaaataccttatgaatggtgtttgcagaagcaaacagtgagagctatctgagaggagaagtggaggaaaaacggtgtgggaaagcccttatgattttctcaataccatctcttcttctaaggtctatccccttcctgaatcagaacttcatccttctttagcttttgcatgcctgctctgggtcaggatcccaagagagaaatgagagtaggaacaaaaggcccttggggttggtgcttggcagaaggtaaaaacatgcagagaataagcagagaccttgtacctgttcatcacccaccccaaatatttgggcttgatcaaagcttctcctgacccctctttatgtaagatatttcccttcatggtatctggaatttaaacaacaatcacaaacattttgaactaggaaatagcctcctactcttcagaatcaatatcaatcagtcattcctcagggatttatttttccctatgaatcaaattttaaagaagtggatacttgaatagacttgaggtgttaaaactctcgtctaccttgtcctcccttttcatttgggaaagccaaaagcacaaaagagtaggtagaaaatgtcagaccctttggcatcattctcctgtaactatcagtctcaacccactgcaacctttaccccagtctgccttgcagacacacagtggtgcttctgatggagcaagagacatttcaagattgcagagaagtggaaggaggggtagcaacagcttcccctgtgaagcaatggaatctacagaagggtccggtgattcagctcttatgggctaagaagcctgaaagcatttcagtgttgctgagtccgagcttgtttgttgggtagtcaggcaaggaaaaaagggctagagtctgaagataagctgagcatctggttttgcatctacattagttctgaaaagaggtgatgggggtgccatgtaggagtccagtaaagacggtgtagggctgccaggtagtagagctgctctattttgcttcctagttggcctcagaaatcaagtaaaatagtcaaataattgtgtctgtttgaaggtagggatgtagacaggccatttctctttgctgcatttctggcctcaaaacctcttctttcttttcctccagaataaaatataacacagggagaggacagaacttgttaatagactgaggccagcaaaaagccagactggttcctgaattggagggaaggaggctgcctgactttggaggagcagaaaaaaataagttaggagattagagatgggccacagcttaaatagagaggttcgactctgcatttcccaaatacgtaatgcttacggtacacgacccaagctctctgcttgaatcccaaatctgagcggacagatgagggggcgcagaggaaaaacaggttttggaccctacaaattggcttgaaatgaaaagtcagcaaaaaccactgggtggcagcgtggtgtgcgggcgcagctctgcagtgtctgcttctgctgctaccgctggggctgaacccgtctggggactctggcctcctcccctgaatggctacaagtgtcgccaagcaaaatacctctgcgcgggtgggtgagggttctccgggttgttggtgcgtccaagcctgaggcagggatctggcgaacttctgaggggctccagcccgagcacaatctggtcagctcaaacactgaggaaacacccccaccactccatcccccaatgccgagcaaacccccgctccgtcagcccaactacctcatctcagttcctcctccatcactgtttcctcccgaagctcctttcgggaaaaggaggggagaaggatttggacgactggggcagtgcggaagcccctacaggtgttagccggaacgggcggccggggacttgggggggtgggggtgggggtgggggtgggaggggcggcctgcggctccgagcctacgggctcagccccgggagggaggggccgtcgcgggagggggctgcaaggaggctgtcgcgctgttccggagggtgcctgcggcggctgaattcctgtgctgcgactgtgccgcgcccagagcagcagcaacagcgaagatgcgaggccattacctgtttgatccctgtcggaaacctggcacgggccaacttttcccgattatcacgccaagaagttgcaaggactagtcgaagactcggaggggccagggcgagggcgcgctcccccgcgcgctgcctcgtccctcctccgtccggccgcccgag

SEQ ID NO: 44580 - DNA, 2300 bp, Homo sapien
gaggatagcagaaataaattttacctgacttgcaatttggctccatgtcggctctcattttgtttatttctgtgctgtctagacatcaacagattgagctgctcccatccctggggacccccttccccactacactgaccagtgcagccccctgcagggccattataagaagctatggcacagctgaaagactgagtctcttgattagacctgataagaccactcatattaagatgacttaattttgtcccttgagaaatgcctttttaagagctcccacattggccaagagagactgcctccatattaagcttttctatttttgtttgaaggaagttggcacctctcctgtgtaaagagtttgctgaagcctaaattcttccattagccattttggtttgcaaacagggatctgaatatatgcagctttttacctggtggcctgagcacttgctcagcttcccaaccagagaacaatggggaataccccatggccacattctgaatctgatcatctgtgcttctaagcatgattgactagttaaaataatggttttctgggaaacaggactggctacagaatttgcaggggttagtgcaaaacgaaaatgtagagatccttgttcaaaaaattgttagtttcaaaatggtgacagcaaatcattaaacccagtgcagggcccttctcagagcatggccctttgccgctgcataggtcatgtgtccaggaggtagccctaccaaagaacagctattttgcctttttgggttctaaaggctcctgttgttcaggtccctgggctgtggatggctattggggtataggggacggtgtttgatttcagggcagaacaaattttctccatcctctgcctactgctgaaatcccatcctcagagctaaagcaattttgttgaggctggatccctttgggaggggctaacatttgcagctgttgtctgttacacgcttagtgttggatggaaaagtggagggagagagcacaaggcaattttgattatgcagagaagcttatgaaaaaatatgtaagtttatggaatgcttttggatatacattatcttcctttccatatagcactgaatatgggtactggggcttaataaatatagctcctcgtgggtgttggtaattcttcaatattcattgatagtgacaatattcagaacttgagacagatttcctttctctctgactcgagggcagttttcccagagccacacagaaggagaatccagtctgttcaaaaggaaagactcatttgatcccagaataacttacatttccatttctatttgaatttttaacaaaaatagtgggtcttccataaagcaaaaataaaaagcatggcaattttgtttcagggtttgctttttcttaaaattttgattcctatattaacactattgagtgcttcagtaacgagtatggtgtaatgctaaaatagtctgtttcttgctctttgttataattagctaaaagccttttcataggctgctcatagattttctgaatttttaacaagggactttgatatgaaaatataattttgtggcacagaactaaaagttctggtagaatttcaacattttacgtgtaattgttacagaggattgagcaactataattcttacaaatgtctattttgcttgtagcgttttctattcatcaataattcaatttcaaaataaaagacacatttcaacatcccaaacactatcggggagactttcagattcctgactgtgggagaagtctaccaaataaggcagccagctccaaaaacttctctaatgtgctgagggatcctgttacagaccgtttttcataattctagaaggcaaaataaaattttatgcttggaaataataagtttaagcaaatagtataggcaaagcttatgtctgagtccaagcaatggtctgattactgccagaacaatactgctacatgatgaatcattaatgatctgggagagccataatggtctgtcactaatgcccattaatgatctctctatactgagagtatgggcttgatgtttctggccattaccttggagaatactttagatatgccttaaactttctctgatctcctctctctctgtgtctgctccaaatgtagacagcaattgtctgggtaggaccagcttataaagaagcatggctttgttaaggaagtcgtattcaggtaagatttatttctgcaatgtttttgatggacatagatttgaatgtttatcctggacattaatgcctttgtagaaattaacaaaatt

SEQ ID NO: 44581 - DNA, 2300 bp, Homo sapien
gagcgaccagccctaggaggaggggcctgcgtgtgggggtgggggtgggaggtggcagccgccgcggtcagtttcactctctgacctactgacacccagatcccagagagcccttctctccccactgagagccggactgtctcaacttgagcagctagccagaagcgaaaagtcgtcgactcccggactgagattccactgctcggtgcgagcagttgccaacaggggagtccccaaagtgtaggtggcgaccagcacgggcctgggaaagcaggcgctaggagtagaggagttacaggggccggggtggggggagcgccggccttccatctccttggccaacggtgggagcccgctacagtggcacccgcgggccctccctgccccggaggggccagggtacgcccagcagacacgctcgcccgcactacgcggggctcgccggggttttgccaaccggcggctgacgtcggcgcgcccctgccgagctctccttttactacagcgggcaggcggctttgtgaggccccgccttcgccagcccccaccctccgcgtgcccacaccttgccgtttatatagaatgcgccgcggtgttgattcgtggctctctaggaccggagagttctttggaaggagagcgcgagcgagggagcgggcgagctccgagggggtgtgggtgtagggagagagagaaagagagcaggtaagggccatcgtctcccactcctccgccggcgagcaactccggccccctttttggcaaaataataggaacctggaaatggattaaatagaaagaaagaaaagaggcgaccctctcctccccattccccgcgggcgagaagctgcgcgactctgcggtgtaacaggctcacacgttgctcatcacatgttcaaacatttccctttcagggaggcttgttatttttaagtgaatatttttatctttgttttgattttttaaaaagccttcctcggggttttattttgatcgagttggcggcccgcagcggattgggagaggcgggggaaagcagcctgccagtgcgcgggcagcccacccaggcaactcccagcgagcggcccgcgcggagcccagggaggccggcagtgaagccggggagtcccggccgctcctctcggccgccccgggggttgcgagcgtggctctccgcaggcgggcagaagctgagggcgcggggcgcggaggaagcgccgcgccgctttgtctcttcacttcttgagcgcggcgagcggctcctcccgcggccggccgctcgggatcgcggcggcggcggcggcgacggcggctcctccttcacccctttcctttcctccccactctctcgtaggcagcggcggcggcggcagcggtggggaaaagcggattccgccccgaaccacaccgaggggagctcgtggtcgagacttgccgccctaagcactctcccaagtccgacccgctcggcgaggacttccgtcttctgagcgaaccttgtcaagcaagctgggatctatgagtggaaaggtgaccaagcccaaagaggagaaagatgcttctaagggtaagcccgcccgccgagtccgcctgctttcctttccttcgtttccctcgccccctcgcgtgcgcgccgccctccggcggctccttgcctccttcccggagcctaagctgcccatgacctctgcgaccccgggagaaaagggggggcagaggtcgctagggggtggatctaggtttgcaccactttccctccttcctcgcggaattgtcgaccctcgagtgcctccagcctcctccacttcccctctggacgcacggtggtggcgctgcgggcagacgaagctgctgcagcctggagcgccgggaaccgcgctgtctgctgacagccggccgcctgtctgtatgagtgcatgtgtgtgcgtgtgcgcgagtgtgcatatgtgtgctgcgcgcgtgcaacatggtgacatactcaggaatctgccctgctgtcagaacccaagcttgaacccaccttcagccccctctccccgcccccaatgcaaacaaagagcctggtcgagacgcagaacccctcccccctcctttcccaccacctccttccccccccccgccacccgacacctcctaatcctaaactccttatccaccccaaccctccgggaaggcaggagtttgcacccttcgacacgccgcgtgcaaaggtgagcaaccctggtgccctggcgccgcccgcgctgcgctttggcagcgcagcctcgccaagccccaggagaacaaaggctgatgtcccc

SEQ ID NO: 44582 - DNA, 2300 bp, Homo sapien
acctctctgagcttcattttcctcatttgtgaaacgaaaataacaaaaccaacacgtccttggggttgttgtgaagatggaataagataatgatgtaaaagcatttagcatgctgcttggcacaggttaggtgctaaattgatgtttactgttttggggtataaattgttattatttaaaaaatgttgacttttattttagattcaggaagtgcatgtgcaggttcatcacatgggtatactgcataatgctgagatttggggtaggactccccttcccctcgacctttcctctaaacccatctaaacctccaacccttttgaattcgatcatttgaagagaaatgttttccttcccagacaactgatatgaactaatggtctaacattggcttggataatcacatcgtgtcatcaagcctcagattattagatattatttacaagaaaaatgggcctggagttcctctcagactgaggatggaggctgcaaattgagtttagagggttgccgacctttagacctggactgggagcaggggcagcccacactcctggtcttgaaagccacagcaggctcttgtaattgagttaccgcctgggatgcagtaagactaatccatctatatgatttcttcgcctggtttaatgccattaacaaaaccgaattaagaagggggtggagctgagtaggacgagggaaaacgaattttctgcatgggagtcgctaccgcgccttcatggccaggatgaagcctaaggtctgattaatggactgttctgaggaccaagtcctgctagtcaccaccccagtccctcaacagagcgcgaggctaccagggactcgcatgcacaaaaaaaaggccatcgcagaaaaggttttccaggacgccccaggggctatttcctgactactatctcaccctccttccctagttcgttcattttcttcccttcccttcccttcccttcccttccctccctcccttccttccttttctctccctttttcttttccttctttctctttctttttctttatttctctttctttctttctttctttctttctttttctttctttctttctctcttctttccctccctccctccttctctcttttctttctttctttctttctttctttctttctttctttctttctttctttctctctctctcttcctttctttctttctttctctctttctctctctctctttctctctctctctctctctctctttccttcctcatctgccctctgtagaacaattcttgagcagttttccttctagttctaatcttcagggaccttctctgggttttgtcacaagtattcctcaggcaacgtttcaatcctacttattcctcttcagcactcgcccccagtcccacctcacccgtttgcctgggattggccatcctgggcggtgggcactctttgcttccagtttaccaacaagagcgaccagccctaggaggaggggcctgcgtgtgggggtgggggtgggaggtggcagccgccgcggtcagtttcactctctgacctactgacacccagatcccagagagcccttctctccccactgagagccggactgtctcaacttgagcagctagccagaagcgaaaagtcgtcgactcccggactgagattccactgctcggtgcgagcagttgccaacaggggagtccccaaagtgtaggtggcgaccagcacgggcctgggaaagcaggcgctaggagtagaggagttacaggggccggggtggggggagcgccggccttccatctccttggccaacggtgggagcccgctacagtggcacccgcgggccctccctgccccggaggggccagggtacgcccagcagacacgctcgcccgcactacgcggggctcgccggggttttgccaaccggcggctgacgtcggcgcgcccctgccgagctctccttttactacagcgggcaggcggctttgtgaggccccgccttcgccagcccccaccctccgcgtgcccacaccttgccgtttatatagaatgcgccgcggtgttgattcgtggctctctaggaccggagagttctttggaaggagagcgcgagcgagggagcgggcgagctccgagggggtgtgggtgtagggagagagagaaagagagcaggtaagggccatcgtctcccactcctccgccggcgagcaactccggccccctttttggcaaaataataggaacctggaaatggattaaatagaaagaaagaaaagaggcgaccctctcctccccattcccc

SEQ ID NO: 44583 - DNA, 2300 bp, Homo sapien
tcatgtctaaaacaccaaaagcaatggcaacaaaagccaaaattgacaaatgggatcaaatgaaactaaagagcttctgcacagcaaaagaaactaccatcagagtgaacaggcaacctaaagaatgggagaaaaattttgcaatctactcatctgtccaagggctaatacctagaatctaaaatgaactcaaacaaatttacagaaaaaaacaaacaaccccatcaacaagtgggtgaaggatatgaacagacacttctcaaaagaagacatttatgcagccaacagacacatgaaaaaatgctcagcatcaccggccatcagagaaatgcaaatcaaaaccacaatgagataccatctcacacaagttagaatggcgatcatcaaaaactcaggaagcaacaggtgctggagaggatgtggagaaataggaacactttgacactgttggtgggactgtaaactagttcaaccattgtggaagtcagtgtggcgattcctcagggatctagacctagaaataccatctgacccagccatcccattattgggtatatacccaaagtattataaatcatgctgctataaagacacatgcacacgtatgtttattgcggcacttttcacaatagcaatgacttggaaccaacccaaatgtccaacaatgatagactggattaagaaaatgtggcacatatacaccatggaatactaggcagccataaaaagaaaatgagttcatgtcctttgtagggacatggatgaagctagaaaccatcattctcagcaaactatcgcaaggacaaaaaaccaaacaccgcatgttctcactcataggtgggaactgaacaatgagaacacttggacacaggaaggggaacatcacacaccggggcctgttgtggggtggggggtgaggggagggatagcattaggggatatacctaatgctaaatgacgagttaatgggtacagcacaccaacatggcacatgtatacatatgtaacaaacctgctcgttgtgcacatgtaccctaaaacttaaagtataataataaaaaaaagatcattctaaaatttatacaagcccttagaacagttaaaaatatcttaccaaaagaagaataaagttggaggaatcactctacctaatataaagtcttactacatagctacagtaattatgacagtgttatattggcagagggataaatacatcaatggcacaaagaatagatagagaaactggaagtagacccaaaacaatatggttaactgacttacgaaaaaatttcagaagccattcaatcgaggaaggatagggtggtattgttgttttttgttttaacaaattgtgctggataaattggacatacctatggaaaaaaaaatgaagtttgacttaaacatcatactttacacaaatattaactcaaaatggagcatgggcataaatctaaaacttcaaactgtaaaacatttagaaaaaaataggaaaaaaatcatcaggatctagtgttagtggaagagttctaaatgtgatccataaaacaaaaacaaataaactggactacatcaaaactaaaaaattctactctgtgaaagacctaattaagaggacaaaagacaagctacaggctggagacaatatatttaatccacgtatctatgaaaggactcatatctagaatatataaacaaccttaagaatctgacagtaaaaaaaaaaaatcagactaactggaccactcatacattgctgatggaaatgtaaagtggtacagccattttggtaaacatcattgctctctgacaaagatacggtgggtcccactgatgaactgtgctgccacagtaaatgtagccactatgcctatctccattctgaagatgtgtcacttcctgtttcagactcaaatcagccacagtggcagaagcccacgaaatcagaggtgaaatttaataatgaccactgcccattctcttcacttgtcccaagaggccattggaaatagtccaaagacccattgagggagatggacattatttcccagaagtaaatacagctcagcttgtactttggtacaactaatcgaccttaccactttcacaatctgctagcaaaggttatgcagcgcgtgaacatgatcatggcagaatcaccaggcctcatcaccatctgccttttaggatatctactcagtgctgaatgtacaggtttgtttccttttttaaaatacattgagtatgcttgccttttagatatagaaatatctgatgctgtcttcttcactaaattt

SEQ ID NO: 44584 - DNA, 2300 bp, Homo sapien
atattttttttctttgagattccaacattgccagccatctgaaattcttactttgtctcctgactgattgaggaggtcacgcccaccacaagaacttgatttagttgcaaaggcaaaacaaaaatctaggttgttggacttccaagccaatgttctagcacttgcaaggtaaaatgggtaagatcattattcttttaatactcagaatgaattattcctcactttggacaaataagcaaaaagtggtttcctgtttatttaacagaggtgtttaatcattagcagtggagagaagagttaacattagatatactcaaattactaaaataaaatagaagaaaatttgactttctatagcatattagtgctttttcaaaagcattcacatttattaagtattgttgattctcttcatttcctgattaagtactgcaagtaggtatcactataattgtcttatagatgatgaaatcacattgatatttatactttggaatggctatgtgatgaatccaagctcaaatagccaagtaaccaaaaaagccagagcaagaattgaaatgtcaagaattccagttggtgatggtttctatcattttccaattggcttacaaatagacaaatacattcaatgttatttagataaaggtaaaatttcttttgagagattagatctgtcctccatatacaattgagccttatcagtggggctaaataaagtaaaagctatttcccttgctccggtcttttaggattggtccttgggcttgctgagtagaccttggtttatgctaataattgcttctcttatactaaataaagcacttgttacattagaacattttttatcacccaggtttttttcttttggccaacactgcacccgcctgattaaattaattttcattttgtgactggtttggcacctgacgttagtttttttggtagagttttatttttattattcaaaataggtggcttgtaacagaggttctatttttcataaaagagaaatataagattaggtcatgatcctgtcattttgaagtcaacagagggtaattacttgtctaccggggagtgatactcctctttctgtattcccagggctgctttctcagtggagaattttgacctatgctcagtaaagaacttggatcccagggtccctttattttcataactgccaaattgatcgtgctgggcaagggaggggtacagattctgaccacatgtaactggctataggttgttttaggtgtttcttttttaacatgttaaatgtttttgcttgtggtatagtttctatactcatactcaagagcacattaattacatctcaaccattagtaactgttggttactgtttgaaataaaggtaaatattgaatgcaagctaatttcaagtgcaaaagttggcattcagaaaggatttctagtgaaatctaccattgtgtagctaggtataattgcctgtggtgtattatttcaaacaagtgtctgtgaaataatcatacaattcaatttgaatacctttatttgtagatttcaaaacaaataaaagcatttaggttgtatttcataattaatgagaggagactttattttagttatacattttggggaaaggttaatttgggagagaattgtatccgtcttagaaagtttgcatgttctattctttctagattattaccaggacaaaattttgcaaactatagcctttcacaaggcttaaacccagaatacaataacagagaaaacaaaacagaattgaaatttaagtcacataccagggtaggacgagagtaaaaagcatgagttaatactaccttcacaaagattcttagcattccaccttaaaaatcaaactgcgcagaggagaaagccagtcccatcaagcctgctcctaggaagagagctggtttttttttcctcctccttccactcttaggacatgcctgatcttcttgagcagtccagcacaagctaatccacaaggttcaatcaggctaagtaattggaggaatgtgttaactctgaattacaaggagcagaagggaaggatctgtcagctgactaatcagggatagtggtttttttttttttttcctccccagcattgctgccactgtgctaatggaagcagccacggcagctttgtttgatagagatttttggctgccgtttttaaatactacccaagaagcagctcgtatttcatcaacgttgcgttgacaattggaaaagaaaagtgtaattgcgtacaggcgaaatggcagaagcaaatccccggagag

SEQ ID NO: 44585 - DNA, 2300 bp, Homo sapien
ttgttctcactaatatgtgagagctaaaaaaatggatctcatgaagatagagagtagattggtggttaccagaggctgggaagggtagaggggaggggatgaaggggaaaaaagaatgtaaatatatttattaccactgaactgtacacttaaaatggtaaattttgtatgcatattttaccttgataagaaatataaaataaaatggaggtaatgaggtgaggagtggggagtgacttgttgaaaattacagagcagctaagtggtcaagcccacactaggccctggtgctcccactcccagcccacagacttttattttgggtcctgaggcctctctcattacatgagtgcttaaattgtagagtaagtggacatagtttccatagctatgcaagagtctgagtggtatcagagaatcaagttgttcatattaatacttccagatctgccacctgacataaaatgcatcaattcgtctttgtacttgttcctactgatcaaagcaagggagaaatttgggtctcctattatgtaggaatatttttatgtctgatgctttctcatttaaaaagtagaacacattttaactattgccacttttgcaggctcctcaggggagaaagtgttcttgtatcttttgcattaccctcattctcacccttcttccatggctccatgcctgaaaatgtcaatatgtgacacatgtttgtagctgttataaacacattcttttatctgattaaacatctagcatggaaagaataactgcgagtgtaaatgtgcatgccttgatctgaaatatatcgagtctaaatatataaaattacaagacatttttaagaaatgactttatgtattgacaaattagatatttgtaatggcatgtatcttatgaaaataaacatcaattaaaattgctttatgtttctaatcatgtgtcgggggggtgtctataacagataacctattccactgtctattgtggaaccattgagaacttttttttttaattcccttgaggattgtcctttataaaccacatccatgtggtgtgatttgaggagcactgagaagggtaatgcatcatcagcctgacaccaccagagaccaggactttgaaggcactttgtgtcagagagcaggtgaaaaacatggcttcagtaagagatgtgaaaccacaggcattaaaaccgacaagccaaaatagcctagtttgatgacccgttttcttttaaaaagttttccttgttcatggaccagaggcaggtagtgtactttgatttttggcccctatagagttcactagaattgaacattgtaagttaacacttaagatctgggacaatcaaagcacattgaacaatgcatggacattgttccatctgtaatgataaaaaatgagttaatatgctactttttattgaacacttaccattatgccaggtatttcacatttagtttgcatggtaccttgtgaggtagatatcattatgcccagtttatagctgaggaaactaaggtttagagaggctaactaacttgcccgcgtttgcatggccagtaaatgcaacaagctggatttgaatccacgtctatctagactaagaagcctatatggttaaccacttgtaaaatgggataacagtacctaccttagagattttttaaggattcaataagattaaaaaatccaaaaagcactttgtaattgctaataaagctttgtagagtgaaaggcattatcagaagtagaagacaatctgctacagtgtctccccatgaccatctacccttcaaataaatccgaatgtcctggagtttgtgcctttgtccttggctttctggtgagtgagagtagtttatgttttgggcatagattctgagaagtaggtcactggttctacttattcagtgatattttcgagtgtgatttctttgccatgtagttgagaggaggaaagagatcgacagtgtctgtggacacagacctgtggggctcccagaataattttagacacagtgagaaatcatgtgtctaaaatcatgtaaggctgtaccttaacatgtatgtcatttcttctattttcgtttgtcatagaaaccgatctgctcctccgtataaaggacatcagtcatttcttaatgcaagacatcgccttcttgtctggtaagcaaactttcttatatatagtccagatagatatatgacttgattagcagttagtttggtacctattatataaatagctcgctctctatatatagagctattatatatattcatttgagaagcactat

SEQ ID NO: 44586 - DNA, 2300 bp, Homo sapien
cttatgtttatgtcccttgagtcttaattagaagaaactctattttgaaaagctttttaaaaataaaaaccttaagaaataaaaatatgagaaacctaatcatttaaggaagtaccagctttaaaaagtataattacagcatatatttggtacctctataggtaattgagagcaatgaagctggaagaagtctctattttctttaataatataacaaataattcaaagttgattaagaacataccatatacaattgtatgtctgcccagagtaccataattctatgaatctatgtaatcagcatctgaactaattatgcaaaatttctacaaaaataaaatgtttccagcgaactcatttccaaccctttctacagactattccttattgatgaaaataaatccagtaaatgattatggtattgtcacacctgtttattcattagtgctactaaaaatgaaatgttaatctattttttattttattgcctgaagtattatcattaagtagagttgagccactgcatgaatataaacttataaagcaaccagtaaaatgtgactagaaacaatgtgaaacttcagctgaatgtggtcacaactgatgtctctagacatgttttaccctgaggcattgagtcacacccgtctttggggttgggtagtgagaatgatgacttccgagccccaaaccacatccagaaataatagtgtttattttttactgccctactacaaaactccatagatgacatggaggttaaaaaaaaaaaacaaaaaacaactggatgcattagtcagaaggtatgatgccaaggaacactctgtgactagctgccatttgtcatctgggcccctgttatggctcagttaactgcctagaacattattcaaggtgttcttcagaatttgagtgaggtagagttctgcagaagtcttttccatgtggcagacttttcccagaaagcctgtgtagcctaggcctcataaatttttctaccttcctgttctcacttttattccacaatctaattttcataaaagtagagccacaaactcagttttatcatgttacataagggtgcatagacattaatttttaaatgagaaaccaaattatcttcaggaagcatgatgtgtcatctaataaacaggagccatggttatctacctggagctctttaatcctagggcagtctgatgtgcatcctgtctttaagcaaccacttcttccccctcaccttcaaagaacaatagcttcacctactgaggctctctgtggttcagctcagacagaagggaagggaaacaggctgtgcttctcaatggccactttacaatgaagtggatgactcagaatgaaatctaactccagaatgggggttcctgctggatttctggattctaaggcttaatgtccaattagcaatattctactctgtgtcaacctatttggcacatactgttaatatatatttgtggatgacaatggtagattccttccatttgagagagatgataagcttctactgtcctttttatatttacatagtgtttttattgggagagagttataaaaatgtcttttgaatttctgaatacagaacacaaatccatccccatcttaataaaacagctgaggaaataaaatgcttgttaggataaaaatgaaccatttctcttgaatatcttttaagcaccagcattttctaatgcacataaatagtcgccagttggcagctttagaattgattgcctgattgtcttcaagtcaaatgcattttatcttttttctcctttgattatcattcctttttttccaaacatttggtaaatgaaatttgtttattactttgggatattctagagaaaattatttttattaatgtatgtaaggaagattctttttaaatacaaacgacattttaattaaatgtccatttcatatgacaggaattgatttgtttttccatcatgtattttctttccactgcaggccttttctcaagcaacagagaatgtattttgtatttgcccaaatgctgtcttctgtatccacatggttggctataattcttctaatatttatcagcctgttccctgagattcttctgatagtattaaagaatgtaagaagaagaagtgccagggtaagaactaagtttatcttacaacctgatttttggaaggggcctcaatatctgccatgagctaaaaacctgatttagaaaattacattagttacagcatgttaaacccctccttacaggttcatcacttaatttcctcttctgcataaaa

SEQ ID NO: 44587 - DNA, 2300 bp, Homo sapien
aattactgctcatttgagaggtttagttctatattataggaaaatcccatatcaaattctttagagacatgaatcatccaaatgacttgttttgatgaacattgctgttagtagagtagttgccttctttggcctttatcacaacagtgagttccctcttcagtgctgcatggagtaatagaaataaaccctaccagccacaggtgtggtgtacctttttgtgaaaattggatcacaggaaaatctggcattgtggcctgatcttactgactagctgtttccctaaacaattcatacaaaaatatttggcacttacacacaggattcaacttggctttttttttaaatgaaaaaatactaagataatacttgtatatacatggtacatgtaattattaaatgtttttcaggtatacggaaactggacttttggaaccattgtttttacagtcttagtattcactgtaaccctgaaggttagatttttacttattcatgtattttttaatactgtttttataatactttcttgtcttatcctaatataccatttttttgtctcctttatttcttgttatgggttgttattcaagtgtttgccttaatacttactaaaatgtgtatgatactagggatttgggtatttgtatactattttttgatcagttttttccccagtatatcgtaatcctctttatattgttttacttaaaaaaattcaaacaccatacttatgtcgaaaatctgtttcttctttattgctgtttttaaggcgttatgataagtggcatataaacaggctgtgggtgagagtgagagagagagcgagagagagagagagagtgtgtgtgtgtgtgtgattatgttaagtacttgaatcttctaaaaattatacttctgtttaagaaccccaggcctaaaataggtatatatgagcaagataatatgtgaaaaagagcttggtagtagtgaaatcttataaaatgttttcatcactgatggccaggttggtggctcatgcctataatcccagcactttgggagaccaaggtgggcagatcgcttgagcccaggagttcaagaccagcctgggcaacatagcaagaccctgtctctatttttatatatatatatatatatatatatatatatatatatttttttttttttaatttaaaaataaatataaaaaaataaaaatatataaaatgtattcatcattaaaatttacccatgttagtgataaagtgcctaagaatataatgcaggtaaacaaaagggaggtaattttggcaaaatcattggcattgacatgcagccatgtgataatgctgtgaagcctcactgaatgctacccttgaggcccatgatttgggaatctcttatagttgaaagcataatcaaattatttttgtcattccaataataaacacctcacatgggttccatgagtaaatacctttaaatgaattctggcatgcccaggggttagaagcagaattcagaagtataattgtcaaaggatctctcttacctttccctctaaatttttgttcctggtttatttcttataccagatagagctaacatatgtttgctttattcatctatttcagtaacattttaggaccttaaaaggacattacaattcatctcagtatagccacttactagctgtgtgtccttcggcaagtaactttacctctctgtgcctcactttcctcttctataaaatcgagatagaagtagcacctaccctttttgaggactcaattagtgaataaagcacttaggagggtgctcatttcaatatatgctagttttcggtttttattatgtctcacagtatcacaatttgaaatggacgcctcccccctccttttttcccctggccttgcatatagccacagggcttccaaatggccttcacagtgtttttcaagtgtatctcaaagacttccactccctcctctttggattaatattagtattatctttggattcatattagtattttccttagcaaccagaagaatagcaattcaagactgagctacattaataatgttatcaacatcctgtttataaatgagaaactataacagagagctgatgaccatggtgtcacagcaagtaacaaaactgagacaccatctcctctataaaaattaactgctctggatattagctcatgtgacccagaagttttaagcaagcgaaatagtccatacttttgtttttagatcacatttgaaaaccccagataccacaatctgaaaacatgattggtcctggcagaa

SEQ ID NO: 44588 - DNA, 2300 bp, Homo sapien
ggtgacatttgggcagagacctggaggtaagggaaggaataacgtcgacatcttaaaggaaaagtgtaccaggtaaaaggaaggtaaaagagtaccaggagagctcaggaggtaatgtgatgtgcaaaatctttatttttgattttggttttgtgctagtgctgaatgtagcaacctttattgcaaatatctttggagtacctttgagtagtcagcctttttcagtccagaagcacattaggcattctctggaacttgcgaggaggactatgaagaatgtagaaatggaccaggattcagattctttacacaaaaagcttccctttctttagcaaaactaggatactaaatgtcttttttttttttttaatgaaaaggaaacattgtaacaggtttcataaaaaagcagtattatcaactttatctgtttgttttggggatattctgtctcttctaattatgtacctaagaattacaattatctgtcatgtgattttaaagtaccatagtgaaacaaaagtagattgatgcttcttttgtttgaatgaaattcaagactaaatgacacaccagtcaatctgagttgtattttttaaatttactcattagtgaaaatgagtagcttccaaagaaaatgtggtgttatgtgccacggactagtcctctcctttgaaaataaaaaggaatgcaacacttttttttgtacttcttaattcagtggaatatctttgctgagcttaaatctttgtttatagaaagtacgttggaagtgtcttttaacttcatggagaatgttgcatccattatcatttgctttgtctctcctgccagccagagttgtagtcccctcctctgggtttccccagctccctgtgtacctctcattctgcctctccatctagaatttgaactccctggtggataggggaggaatcgtctctgtccctagtacttgtcatttagtaggcactcggtaaatgttctgaagtcaactagtgaactaactaatgcaccattcaagtaattcccagccttttgtaattatctttagtagccattgattgaaaatacattattttgttaatttgtgtcatagtttaatgcattttattaagggacatttatacatgtgaaaaatacatatgagtatggggaattatttattcaggccacagaaaatgtttgtttgacaatctttagcactgtgtagataaatactgatgtaaatgctttcatcagaatgaggttcatagaatactttaaattttttcaataaaggaagatttataatatcagagcaggcctttataaatgttatagcttccgatctatcctcattcatttattcatctagtgtttattgattgtttttgtatgccaagtcctgttataggagctcaagattgtccaagttctccagtcaaagacccccatgaacacacttgtagttgatcaaattaggtttattactcagttcaggaaggaagaacacatgccatgaggaactgtgggacttctcaggaagaggatgttagaaaagacttacacaatttggacttgaaaatactaaccaaaaatatgtaaaatattaaccaaaacatttgtgacacaggctggctgctgcctgtatttagtttctctgaggattcctcacttatacttaatggtctttgctgaagtaactccagaatagctagttttagctactaagcaatcttgaaaagttgttcatgtctattagaaatgcagcttatagcatgtaaacattctgaataagattctgttaaaggggaggtgtattaatgtgacacatcacaatatgttagtttcttttttatagttactaggcagtgaccttatttacagattcctttgccactaccaaaagcatgtaaaaaaatttcttattttagctagtaagtttttcacatacataagtatcatcttgtagatgattgttacatgaaatttctttctttcctctgttgtttttcattttagccactgtatgatgctgcttaccttacaatgtacaatatctgcttcacatccttgcccatcctggcctatagtctactggaacagcacatcaacattgacactctgacctcagatccccgattgtatatgtaagttaaatatatagttaaaaccccctaagactttcagtgttgtgattttcattttatctgcagatgggaagaacacagaactgtgcacttggtttgtggtatgattatatggttctgtttggaatttttagctattgaaagcagactgctcaacaggaaaatgacata

SEQ ID NO: 44589 - DNA, 2300 bp, Homo sapien
tttcaacctgcttttgcagtgcaccccaacatacattctattacatcacctctttattccctgtttttcaagtcctactttagatattgcacctcacaaagaatccactattctttcctgtgtggatatgtctcaataactggacatcaaccattgattatcttgtttggttaggtagttctctcatgtatgcttctatcaatctaaggagattttctattctccataaaaagattagtccataattctttgtatttctctatatagtgtgcttatagttggtgtttacaagttatttcttcattggttattgagttgctgttttcagccccataagtaagctattaatatatgagtaggggagcaaagaaagagaacacatcatttatgtctctttatttagtgaataaaattatacagcaaaatatttgtaagtataaaatgttatggtattagcagtatacactgaagaaatatggaataaaggaatgatgaggtatattaggccctcactactcaaagcttcgtctatagaatagcagctccattgtcactgggcagcttgttagaaatgcaaaatctcacatcacaccccagacctaacgaatccgaatttgcagtttaagaagattcccaggtgattcctttgcacgttaaactttgagtatcattaaattagataactgaatctctgagatcctgctttgtctaatgcttccactgtagtggttgtcaaatggcacccaagattccccggagcaaaacttgaataaccacttgtttgtttcctaattgaaaaataaaagttaattggcagaattttctcatttgtaagttttacactatatttttcttaaatacttggcacctgttacacatttgtctttcctgacacctaacacctcttagtcctggctacacatgagaaccacctaggaagcttttaaaatatacctatatataaccaagccctggccaaggtactctgatttaattggtctggggataggccccaggcatgggcaatttttaaagccacccagatgatttgaatgggatggctagagaaccactaagctagtatgtaaaatgatacatttaaagaatatatatatatatatatatatatatatatatatatatatatatatgtatgtttgccccaaagccatttgtcttttccctatattgctagggagtttcagactaattgatgatttgtcttcatagcagagtttgactaattaatttgaattccagataccatacgtttcttatacagagtcaggctgcttaacctcttattttctaaacatcaaaaaaaaaagtttatattagtcaaagttcaaccagaaaaatagaaccagtaaaagaatatattgagagatttattgttaggacttggcttgggcaattgtattatctagctgggcaggtctagatttgtgggataggctcttaggaagggctgggactctcaggcgtgagctaaggctactgccttaggaagtctcaggaagtagctaaggctactgccttaggaagtctcaggaagtagctaaggctactgcatcaggaagtctcagctctcctcttaaaacctttcaagtgactgaatcaggcccactttagttatctaggatgatctctcttacttgaaatcaactgcttgtggactttcatcacatccacaaaatacctttacagcatcacttagacaattgtttgattaaataactgggaaatgtggcctcaccaagttgaccttttagaacttgtagtcatctattatgtgcaacttgggtctcaaagatacgattgcaaatcactgttgtgccattattagaggcagttgcttctttagagtgaacaggttgaggaaccagattgatgactccccttatctgagaccaccccctttgttgtttaaaaaaaaaatctggatcctaaacagaaatctgtaataaatccaaacatagcattgtttctctttttcagagcatggacagaacatcaggaatatggattaatcatagatggctccacattgtcactcatactaaattctagtcaagactctagttcaaacaattacaaaagcattttcctacaaatatgtatgaagtgtactgcagtgctctgctgtcggatggcaccattacagaaagcccaggtaactgtgaatattagttaacgttccattctggatacttctatacatatatgtgcaaatgtttatttttttaaaaaattatttcttcttcaaagggccattattactatctaatttcttcctccaa

SEQ ID NO: 44590 - DNA, 2300 bp, Homo sapien
cagtgagccgagatcgcgccactgcactccagcctgggcaacagagcgagactctgtctcaaaaaaaataataataaaaaaattaatcattctttagagatacacaaggtcttttttattgtttttgataggtacgggttcacatttttaggaaatcgaaatggatatatgagagtagagaaccaaagaaaagaaatagaagagtaagtagctctgtgtttgatgtttgtcatttcttaaccccatagtcaaatttaagtggattcaggcagggcagcaaaggaaatgatgccactaaaaatacaggaccctgctctcccagttcagagttttatgtaaatatagttggggtagaagccatgttacatagaattgcagaaactggagtttgaggtggaaattccaatctggttcacatctgggtccagtagccagaatgagagtttgcctggaatgtttctcaaatttagatgccatttcaggtctctaacacatgctacaggaaaaatcagtgaatatatgtgaaaccttctgctatctagtgtccaagcaatcactctgggattgcaagcccaggcaataaaggcagctttgctgtaaaccagaagccttgtttggttcggaatgttcaggtgtgagcctcggggcaagtactctgatgctccagtgtcttcacatttcctcttttgccacaaagaccctaatgaacaaagccaccttatcttaatggtggattttaattaggctctgtgattaatttgaatttcctcatctgaacttgaaatataattatgttatctgactttcattctggcccctaggatctcctgagacccatctcagaaacctgtaatatgtttacaggtacttgggtaatgcacccttttggagagagattcatagaagcccagaggaaggttcttggtctgactgacagggacccagggtcattgtcagagtttagattctagcccatctgcaacagtgcccacatctggccaacagcaaaccagatgccatgttagatgtcttatacatatactcccgcaagactaatgaccccctcactcccaccaaaacaagctatgtagtaaatactttttttaaaaaatactagttgtttattttcaaggaaatatttcctctcactttttctaataaccaactcttattttaactcttctgtgtctctccattgattagttcagccatccacacacacatttgaccagtctcatcatgtcattccactgtttaaacccttttattggctttcttttgctcttacaatacaatcccaaattccagaaatggctcacaaagatgtgtttccagcccctgcttacctttcttgctttatctcttactattcccctattgatgagttttttgggcattggtgaactacttaaagtcttccatgggccatgtgctctcatgctgccgtgctcattccctctactcagaatgccatggccccctttcttcatcatattacccttgcagaacccagctcaggcatgtcctcttccaggaaacctcctttcagatgacttccttctgtgttcttatatcttccctgtaagtgcctttattacagtatttgagaaactagaagggtagttatctcattatgctctgtctcccttatcatatggtgacccgcataagggaagggactcaggcagattcacctctattccccagcacctagcactgtgcctggcactccatacataaatgctgctaaaataattggcagagtgggactgtttctagacccctccaaatatggcttggtgggacagctctttatcttccatttttatgtggtcattctccttaccattttaagtaatatactgaggggctataaataccccttaactaacactggtgtcctctgacagcatgttctatgttcagagaaattctgagacaaaggaaagtaccagttgtgcacacaaccagtgctatctgttgatttaagatgtttaaatatcttaacatatttctgttgtgctttatttttctcagtatattctaggttttttactttgctcatttctcttaaagatatgaacttcttcacaccttaaactttgatgctgtccggcgacgtatgagtgtaattgtgaagactcaagaaggtacatgtctgaaaagcttgaatttttctctttgttgatttgtaggcttattggttgattcactctttcaggaaagagaatcatttcatgtagtagtgtaggattagtgaaagtcatgcaaagcagtagcttttgcatatgctttcatgt

SEQ ID NO: 44591 - DNA, 2300 bp, Homo sapien
ggaagaactacctggacttacgtaaaatgaaaggcttcattaaaacgaattgttttatgtatacgaattgtatgtatcagccttcatacaatttatcaagcagttcatacaaaaagggatgctttctttcctcttctatcatcatattaattaccgcaacttttccacttggcctttacagccacactcaaaaagttaaagaaatacagggtccccagtgatcccccaaaaggagggtttattctctccaaatatgtcagtatatttttcccaccttgacgtttgcattccctgtcttttattgatggctgtctgcttttgtgtcttgcgatctgctgctctgttctgttctcgtcttgctatccatgattcataatccttttatccccccccatgtattttttttgcctatgtgtgttgctggctactcccgtactgtgcttccatctgtgctgtaccctcaagtaacttcagagtgaaggacctttcagcttgtcctggggagtaagcatatggtataagtagacagataacattctgaaccccttggagataggtgtgtgtcagggcaaaatctgtccccagagttgttgatgctattggcttgtttggataagctgtgttcattttttatttaggtctttgggacctgaaaatctcttgctgaaaggagctacgctaaaaaataccgagaagatatatggtgaacaatttttaagatacacctatcaaaaaatatgctttgtaaaggctgtgaataaatagtgcatattaaaaagtaaacatggcaggtttgccatttaatttaaacctacatttaggtgttgggaatttataacgtggtaaactaagacgaaatatgacaaatactatatataattaaaattatcctataaatgatatacaactggtgagtggaagagggcctagatttcccacttttatagacttaaaaattcatagagccagctgggtgaggagttggttgacaagttcttagtttttattatattctgtaatttcttaggagttgctgtttacactggaatggaaaccaaaatggctttgaactaccaagggaaatctcagaaacgttctgctgttgaaaagttagtatgcgccacaatttatttagtcattattgattaaaatagttactttcttggtaattccaagtaacaagcataacaaaaaacaacatcaattataatagcaactacaattttaagcacttgtttatgtaccagaaactgtgctcaatgatttgtatgtctgatttggtttagtcctctgaagaacactgtgaagtaattcatgttaacctctccactttacagatgaggaaatggtcttggagatggtatgtgacttacctaagctcacatagctattaaagggcagagtttacttgaactgtaaattcattcctttttgctagtggagttaatggtttggagtcctttagttgctatatgcaagttggttctataatatagataatagtctcctggcacctattgaagcagtgcctcgtagatcctcaagccagttgccactgctatagacctcaccctgtatttggcatggataaccagtatatcactggcaccctttccatagctccacttttaaactgaaagaacctacaccgagcttgaggatttcacattgctaccgtgccctctaccccaaacatttaggattcagggaaatggagacaagatactctttctataagggttgagtaagtaatggtgtgtgtatgtgtgcatgtgtgtacctctcctgtcactttacaggaaccttaataaggtgtgttcagctagtcagccattgcacttgggggagcattggtggtcaataaacagttcatggccagcttttccattttgccacttgaaagtaatgctgcagctatgataactgaggttaatacacaaaggcttgtgctgtagttacgcgtcgtacacagaaaaagctttagatgactcagtagtttaattcatatctgactgatgtctttggttttaaaatccatgctatcttatttttcagatctattaatgctttcctgattgtatatttatttatcttactgaccaaagctgcagtatgcactactctaaagtatgtttggcaaagtaccccatacaatgatgaaccttggtataaccaaaagactcagaaagagcgagagaccttgaaggtaatttgttttctgctgaaaattgaaactattttttgtgactgagccaaccttcactgaaatgctgctcagggaaacggcaccttttgttagc

SEQ ID NO: 44592 - DNA, 2300 bp, Homo sapien
cctgtgtactctgccacaaagggagaaacgaattcctatttttactgtcaggatgtcagatcaacagttccaaaatactaacggtatatgttctggacagcagcctccataagctcctccagtggccctcagttgtcatcaaacatggcacttgtcaagctccctggctaactctagtcctcttcatgaacactgaagaacagtgttttcaaaaccaagcactctctgctagtggaccataattcatcctgcccctttaggcaggggtagcaccaaaatttcccgtgcctcttctgtagagccagaaactttcttgctttaaataaaacatttacatgtgggttatgttgaggacgttgcctagttccatgctggcccagttgctagagtttcaatattcctatagtttgttaacatctgcaaacctcatcctttgttcctgcgaatagtttacagtcatttaaagtgatttctgggtgtttctgttaatcctgctgtaagcagtctcttacgttatgtgaccttattttatagataaggaaatgaggctcaactaagccattttctccaggtctcattttgaagaaaaaaaaaatgtaaataatatttctcagagtcataactgtcttgctttccctgtcctctccagattttgccctgaaagccttccctgtaggaagaatgtttgtttttttttaaagagatggggtctttactctgttgcccaagctggagtgcagtggtgatcatagttcactgtaacctcgaacttctgggcttaagtggtcctcctgcctcaggttccctagtaggtaggactacaggtgtgtgccagcatgccccgctaattaaaaaaaatttttttttcgtagagacaggggtctcactatgtttgaccaggctggtctggaactctgggcctcaagcaaagcattgggattacaggtccaagccactgtgccaggtccaggaagaatgcgccccccgccccgaaaccctttactttcttcatttattcaactaagccatgctccacaatggaaacttgctttttatctacctcttttgttggggatgttaagaaaagttatagcctggatgtgctctttaaattaattacatttacagctcgggcagtttttaagccagtttgctttttgtatggtatttaacagtttacttggaaaaatgcattcattggttttgctggacacactccaacttgtatttgaactggcagacctttctaggaaacatcacttttatagtaatgacactatcactgaaaaaagaaataaaaccctgttcaggtcgtcagacaccagttttacaatattttttcttttgctccagctagagtttcttatctcttcttaaactgtaataaaaattcttctgtggtgatctagaaagtaatttttggatgagaatttatctcttctaggtaatgatgctggtcaaggcatttttctccctaatatccactggcttttttccttgcgattgctagatattactgttggctgctgagatataactttcttacctctgagatatctaaatagtgagaaaagtcttccatccctaagggacctttccacataaaccatctgcttaggcctttgttgcatatatttttgaagcttgaatttactgtattacagtgactcttagggtggagaaactgtatcatagtgaatacttagattatgtctcttcctcttaaactacaactaaaagttcaattcaactttcctccgaagcttattgtttagccccactttttattgtggtccatttattgtaggcagggattagaaaagaacttcccaagatgaggaaaaattactgtgtggtgtaagatactgatatttaaaataataacaccttaaaatacagaagttacaaaggcaaatcaggtctttggagaagaataacaaaaagatatgaaatggtgcaataatggggctaaggccgccagagtactgctttgagctcttaaggaatagactgtcatctgatgcttcctttgctgcctcccatggaagtacaggaactaggcaagccataattggctcacttcccaagttctgggaaactttacaaggatcacaggggttggtacaagttgcttgataatctgcagcattctctctgagatttagctgccattgtgttgccaaatttctgcatgtcagtatgcagatggtcccatctctccctccagcctctgaggtttgtaatctatatttatttctcctcttttcagccaggttgggttttgaggtcttggggcctgc

SEQ ID NO: 44593 - DNA, 2300 bp, Homo sapien
tgcatatatttttttaattaaaaaaaatcaaataaggggaaaaagttgaaggcccaaggcggaattgcactgtcaattgaggtccagaggagggcagtagaaatccccaaggtggcaaccccagaaaggttcctctcacccggatgagggcaaaggttcaaacttgccatgtgggtgctgggaagagcttaggagcttttcctactactgattcctatagatatgacgccagccagacattggaagcaagacaatcaaatataatggcggaaatcagaaaagtggtacaggttaatctctggagaaccaaggagagagaaaccaggagcagccattcttcaccaagaatcattacacaagggcccaggagcagctctctggggaaaatgacctagtgagatttttaggggtcttggggacacagccctgttaagtacctggctaagtccttggacccttcccctctgctttttaaagtggaaaagaataaatatggccctgcaggctcaagatacagagctgggattagggtgaggggagtgggacaggctcatgcaaatgcagaatcagatcctgtctttatttaaatgttcaatattttgttggtcatagatttttggcattaattttggtttttaaatatcacgttaaaatcttatttgattactgaattttgcaacaccccttaaattttgtgctacaggcaaatatctcactgggttttactctagtcctggcaacaatcaaaacaataacaacaacaaatatgaagcaagaaatggggttttatagtgtacttattatatacaatttttatcaaaataatacctagaatttctgagtgaaatctattattactaacatgctagtcatgtaaacttgcaaatgaaataaaaatcatataaatctatgttaaagccaaagaaagtaaagtgtttttgtaaccattatgaatatgaagttaatgttcaaattaatttggaagctgtttctgaaatactggctttaagatatttgtctaccatgtatccaacactagggaaaaaaaaaaacctgatttctttttttaaaaaaggtgacagatacattctttcactttataagccctattcaaattttcaaaagcagcttattcaaaagcaatagaataacattttctgatttttatacagttaaaaagtatgagcaggattatttagaccttcagggtaaaactgagttgtatttttttttttttggttttttattttttttaagatggagtcttgctctgtcacccaggctgcagtgcagtggcgccatctaggctcactgcaacctctgcctcctgggttcaagtgattgtcttgtgttagcctcctgagtagctgggattacaggtgcctgccactacgcccggctaatttttgtatttttttttttatggtagagagggggtttcacaatattggccaggctgggggttttccaattaatgtttaattttattatattccaatggccccaaatgcataatttcaaacactgtcacctttataggacatgttctttcatttcttttttactctttattttattttttttgagacagagtcttgctctgtcgcccaggctggagtgcagtggcgcaatctcggctcactgcaacctccacctcccaggtttaagtgattctcctgcctcagcctcccaagtggctgggattacaggtgcccaccaccatgcccagctatttttgcattttaatagagacagggttttaccgtgttggccaggctggtcttgaactcctgacctcaagtgatccgcccacctccgcctccgaaagtgctgggattacagctgtgagccaccgtgccttgaacccgggaggtggaggttgcagagagccaagatgatgccattgcactccagcctgagccaaactccgtctcaaaaaaaaaaaaaaaaaaaaaagtcatttggtaaaatttgtatacagaagcttatgcttccctatggtgagattatgttgtcagagtatgacacacaatggtaatgatgtcataaatgcctagaacactctgaactgtataaattcagtagttaccttagtagacaaatcatttgaaccaagttgcggacatgaatcttgttatttgtgtcctacttttgtccatttggaaaaataattgcatgactacaaaccaaaccaatggatcttctactacaggtaggtgcctaaccttaaaacttgtaaattatgatctgttacagtatacattaaagtatttaattagaaacgccagctgtatttaaga

SEQ ID NO: 44594 - DNA, 2300 bp, Homo sapien
atattgatttataaattcaacaccgtcacaatgaaatcataacaggctttgacattaatagaaatgctgattctaaaatttttaagaacgtagggagtgtaaattagttcaaccattgtggaagacagtgtggggattcctcaaggatctagaactagaaataccatttgacccagccatcccgttactgggtaaggattatgaatcatgctactataaagacacatgcacacgtatgtttattgcggcactattcacaatagcaaagacttggaaccaacccaaatgtccaacaatgatagactggattaagaaaatgtggcacatatacaccatggaatactatgcagccataaaaaggatgagttcatatcctttgtagggacatggatgaagctggaaaccatcattctgagcaaactatcacaaggacagaaaaccaaacactgcatgttctcactcatagatgggaattgaacaatgagaacacttggacacagggtggggagcatcacacactggggcctgttggggggtcgggggctaggggagggatagcattaggagatatacctaatgtaaatgacgagttaatgggtgcagcaaaccaacatggcacatgtatacctatgtatcaaacctgcacgttgtgcacttgtaccctagaacttaaaagcataataataataaaaaagaatgtatgagggacctagaatagctgaaatgatcttgtaaaagaagagcaaagttgaatgagctgggctacctaattttatgtcttagcataaaattgtgacatgacatgaaattaatcatgacaatgtggttttggcataaggataggcaaatagatcaatggagcagaatagatgaggagttggcaatctctttttctaaaaggacagatagcaaatactttatgtggtgcaggctatacaatctctgtcgcaactactctgttgtagtgtgaaagcagccatagctgatagttaaattagtgtatctgtgttctagtaaagttttatgaacaatgaaatttcaatttcacataatttttacatcataaaatattcttttgctttttttctcaaccatttagaaatgtgaaccctttgtcagatgagtaggttgcaaaaattttctcccattttgtaggttgcctgttcactctgatggtagtttcttttgctgtgcagaagctctttagtttaattagatcccatttgtcaattttggcttttgttgccattgcttttggtgttttagacatgaagtccttgcccatgcctatgtcctgaatggtaatgcctaggttttcttctagggtttttatggttttagaaggggaacatcacactctggggactgttgtggggtggggggaggggggagggatagcactgggagatatacctaatgctagatgacgagttagtgggtgcagcacaccagcatggcacatgtatacgtatgtaactaacctgcacaatgtgcacatgtaccctaaaacttaaagtataataataaataaataaataaataaaaatgcaggaaaaaaaatattatcatgaaaaaaaaaaaagaaatgtgaaccaaaaaaaaaaaaaaccaaaaacacctgtcttagtttacaaaccataccaaaacagatacaaatggaaatttgtttgagggaagtggattgattcatattttgactgagaattaaataaggccactgtaccttggagggattttagataagacatctaaaatagtaggtcatggtaaagggtgggagagaacagaatgaaccactgaatgggggtggctgtagggaatgcctttaaggaaacaccttctccctgctatgtgacccaccagaattgaacatggggaaatgatgagggtagcaggtcattttgaaatggaccttcgggtagtatttggggtggaaaaatcccctttctccaaccacattttggccaccccagcaacaccacccccacagaggtatcagcgctttgtgatgtccaagccaccccaagactaccattggatggggtgccccattctgaccaaacaaagctgaagggtagggctcctcattacccaggggtgggtatacataaggaggtcaggagcatagggtagattgttgggaggcttaaatatggctaaggagacccacacaccagtgaagcctaaagaaaatatgaaacaaccaattctaagcacgaaaaagcctaccccaagaaccaaagagaagaaggaaaagaagaactcttctcaacaaaagaccaacaaaaatggcaaggtca

SEQ ID NO: 44595 - DNA, 2300 bp, Homo sapien
acttagcaacagcctccagggcccagaaaagcccagagagggcatgcgggaaagacggcaggagggcagagatattgcacattggcttctgtaggagaggatggatttgcctaagaaagtttgaccttgtcggccacttcgccaagaaaacaggtgcaggtagggattgcctaatcattatgttttctgagacgtacttatcagctcacgttcgctacgcgcgcgcgcgcgcgcgcgcacacacacacacacacacacacacacacacacactgtatctacacacagaagccttccagagagtttacttacatttaaaaccctaaatccgtatacccatccagttgactgcagcccttggctgcagaatactcagatcaagtggaacacaaacttaaggggcaagtttccagaccccaaacttccgagagatgatgccgactgggagccgggattcttttgccagaggtccgcctggccgagagggggctggcctgccctgagcctccactccccccctgaccccactaacaagccgaagaggcgtactttttaattcgtggagagaaagggggaagagcccagcatgcagaagtcccgggatcgcctggtcttgcattaacgctaagacgctagaaacctgggattcccccatgcgccccccacccacttaagattatgctttccgtttagttccccacctttccacggggctagggatgatgggggggcgagaccccacaccgtatggacaccttattttagtttctgccaaatctgccgggatggcttctcattcccactcgctacctcgggctgctccgagagtttcaaacgctgtgccactcgcttcagctggcagtggcgattatcggggtttcctctccccgcagccagagttcccgcgccgctagtctttggcagataacccaacaagcaagtgaatgtcccgctccgaatctcaggaagtctctaaaacaataaaagagacggacggaatccgttagcagagcctgctcccgggggaggcggcgaggctgcgcgcccagagtagcgctcagcggtcccggcaggtgcgggggcagtggagggggcccggcggttcgcccggaggacggcctcggctccgctccggccaacgttcccccctccaagaaacttttctttcactctgagaggctccgtgttgccatgaaaacggattttccaaggggcccgaccctccccctcaggggcatcggactggaaaaaccgaaatggccacagagcagagacaaaaaggggccgctaagcgggggccaggatcgagagagcggaggccagttcaccccctacgtcccacacatactttccacaccaccttgtgcgagcgcctccgacaggctcaggagacgggcgactgactgcttgcccgccctcctgcaaacccccaagagcctcacagccgaatgcaccccgcagtcctgaagcctgtctcccatgcccgggcccctgacccacgctgcgtcctggacgcactggccctcctagagaaagatctggacaaccagcggccaattccagggagagcttcttggagacgcagccaggagcacttccaatgagcctggagtccctaagccggcctgggtagctggtggtgccctgcgttcctagcgctggcagcagaagcggccagaaaacctccgtgcagacaacgggaagctttgcgggctggccgggggatggggcgccggtctgccttgacagggttgcaaagttgttttctaaattccgaaggcgcccctctgccccctccccccaatctgcttgcgtgccccctcccccctccccccgtcacctcctcaggtttcgttctttcaaactttttgaaaccctaattggtggcctctgagtgggcctcgtggactcccgcctcctaagtaactcttaccacgtcactaggccaaagaggggcgtggggtgaacgaaagggctccccgaacttttttttttccagccaggccgaacgggggctcggtaatgattggccagggcgcatcactgcgaacctgtcaatcacgggtcctccgggttgcgaggggcggaccaagccccaaccccggggaatccgagcaggtatataaggggcccagctagagcccaggcagactgtgaatgcgacctgttcgagagaactcatcaggtgcgagaagcccgcgggttcctgctgatttggcgcggagcattttgataagcctacccttcccgccggactcgctggcccacaggcccccaagctccgctccgacggagtcccag

SEQ ID NO: 44596 - DNA, 2300 bp, Homo sapien
gtcaacgaccattattattccttttgatgatcaaattgtaccagagttagccagtgagagccctttcaagacatctcctgtgtctttttgatgtgttctcatcattcttcaagtgctttttggcttataatacaagatacttcaagttcacttgtatttttcctgccccatgtatagcgtcagctatttttccagtaaaccttggtttcttttagtagacaacagtatttagaaactaatacctgggcattagatgtactcattgctgctggtgtgtcatattaattgctactggagtgtcattgcctcctttctgtggacagacctagtaagatttgtcttaggaaatcatgagttcatactaaaaattccgattcaaatccgtcaccaaaggtttctttaggattctcttcactttctcagattcatatttgtatctcctttctcctatagtgagaactctggttccaaaaatacccccaaaaaatgcatttactcgtttgttctaaccatgcagaatatacacacgtggtgtgtgtgtgtgtgtgtgtgtgtgtgtgtgtatgtatgtatgtgtcatagttttagaatttacttctccaataacattaccaataatacagattatatttaagttttctggtcagaaccaaatgatgacgtttgttaaaaatacagatttctgggcttgtccctagcctgccaaaacagaatacttgggaataggtccctttagtcctcattttaaaaaattaacactccaggtgatttagaagaactctgatgtttgtgattcaatgatgtgatgaggagcttgagctttaagtaagaaaggttggtatcctcgttctgttacttagtcttttcaggttcatcacctggtacttagaaaagtgcctgacctataataaatacataataaaggtactgatctttttttattataaggtactgaactggattgccacatatttcctatctggcagaaattaaattagttttaaaagcagtttatgtaatgatgtaatgttgaaaagttgttctgaagtgaatacatttgtgaaaatagaagtaaaaattttctaaaagctacactgtaaagataagtgtgcatgatcagttgagatgtacgaatatatgtttgtatattttaacattatatatgtgtttctttacttcttccacccatcgggagtccagtattttggggcagattatgtaacaattctaatgataacgttacccaaaactgatgaaaaaaagaataacttcgacaaaatacttctattttgcagcctgtgcatattattaccttatgaacttataaagggaggatggactattttttattcacttttataatccctgtccccaccaccatattttgactgtggtattacaggaatacctcattttgttgcacgacacgtatttgtggagtgaatgaatcgttctttctctcttttttattgtaggaaaaatatgtaacaaaaaatttccacttgattttaactgtacagtttggtagcattgagcacattcatattagaacagggttctaccgacagcattgtaccaagtgagggaaccaaaaaattttctgcttttcattgtggaatgtcatttgaatcagaaatcttctggggactttgttatttgaatttctaactttccttattacttgcctgggagaaaacacatattgaacaacaaaatggtaatgttcatcctcagagactagaccttgtcaatgttctctgatgcctagtaggaccactgcaggaaaaaaaaaaaagttaatgagactgttgctaggagacgggagagccaaaagctcatagtcttgtaggggttcctctggaaatcaaggcaacttaagtgtgttttggattagaggtttagctattaaaatctgccctttgaagagcatgcacattttagcatataatgtttagtatgatttcatgtttttggagaatttttgaggataatctcaaggcatttcatttctttccatagggataatccctttttttcagagtacatctcatttccaagtggctgttgcgctgctgtttgcccccactccttcagtgcgacagacagcctcagagctggtggggagacagcatgccactggtaagtagctgagaaatattttgtaaaatagatatccagactaagatttttaaagcaagcgacatgttttgagggaatagaataatgcaaaattgtgtaggaatctctgattctaatcagcagcattgggaaatggattaattaaattctaaatattccct

SEQ ID NO: 44597 - DNA, 2300 bp, Homo sapien
ttactgtggttgagttgaacaggtcagcaaaacttgtaggaggatgagaaagtttgatatacgctaaaggtagaaatagaagttaatgacaacactgccatgtaaatgggtgtttttttcttctttaagaaaagccccccaaatatcaaagctgaggtttcttttagtatgttttatgcacagtttgagtggagagaacctgttgtcaaatggcttgggtaaattcttgagctcagtattacaaagtgcatggaaatttcgttctttatagacatgtttaaccactgtggcaaaaagaaaaaaaaggaggggtggggagaaagggcagcccaggctgatgagatgtgaagaatatgttaggaaacttgtattacatttaaaaagaactttttgtttaaaatcttttaagttcaaaatgcagagaaagctctttaaattacacatttggattacatagcttctaccacccgaatgctaataaagggttttgacagtatatatagtctaaaagcttgcgtgaacaaggtttatgatgtgaaatgcattgattactgaactttacatagtattattaccttttaatggcctttgatgtcagtgtgttatggttgcttaagaattcagaaatatgatgtactatgaacagagtgtatatattactgggaagtataaaatcaaatagaaaatagatgaaagaattagtatcattagcataaataacaaatattgagaaattaagtatgaatctattgtgtttgagacactgcatttcatctttcttgcattgctacgtaaagccaaagatataattaactcatctttgcaaacacctagaattggttcttgactacttggcagtggtatggtgagtgtcacaatgataagaaaatgggacttaaagtgagatctttgccactgacttcttgtctgctctgggctgggggcaccctctttttgggtgagtggtgcttagtcctggcagtacaacccctgggttattgggttgtggagaatcagcacggaggcaaggttttgtaatcacacggatctgctttcaaatcctgcctctaccaattaccagctgtgtgactgtgggcatatttcttaaccattccagacttcagtttctgatctgtaaaatgcagtcaaaatacctgcattataggattgctataagattatatgaaatgcttagtacagtgcctggcacatagtaagcgctcaataaattgttgtgattattattattattataacatgaataagcattatgcaaccagaatatgagagtttgcgcctatctttgcaaaattttcacactttgatacttaatttccctcaaattaaggtatgcatgatggttttaagatgagagaaggaagtttaaaaatgagttttagtatttctttttgtttgctgatgagggatacatgaaacaataatttccttgtctgtaagttactccctgatctgcagtgattctttatgctataatgtggttatcattactgacatttatttgtgtagtgactagaggtaatctcagttttggacatggatgagttcttattctctagaaaataatccatccacttgtttccactttaaagaaaattaggtaactgtgatataggggtaaagataaagctaaatagggcctgctttgcttgaccaccaaaatattagctcagctgccttttgagagaatttgtgtaagtctacgtaatcttactaggcaaggaaaattcctcacagctggcttctgaacttctttgaatttcatgtattctatgatggcattcaagaagtttaaaatagtgttattcagaatcctaagtattcatcataactgatgctgtgtctgctgagtgacagaaacgtcactgccttaattctagcccccactaccacttacctgcataactgtattagcctcacatcccaaccctttaagtgttttagcttggggtattaggtgttctactgtacgtatctagtagtctttgctattcagcaccttgctgctcaactggctttccttatgtacggttctgattccaatacctcctggttcatagacgtttaataaccacccattgtctatatattccactacttgatctttaaatcatgcatggcctagttccagtgtactttcccagttttgtatgccagtgttctctttcatgtaatacatgtgatagttcctgacttcctcagctttatctaagtactaagggccttcagcgcatagctcaagtctaatccctgaagcttgtcacttaaggtctttgtcactt

SEQ ID NO: 44598 - DNA, 2300 bp, Homo sapien
caaaaagtacatttttatatcccttgatataaattttcaaatagtacttcatatatattttaaggcaaaatgagtagcagggaaaataaagaggtcaaaacagctgggtcccatggctattgttagcactcagattagtaaaactgatatacaaaaaatctgttttatttaagtcacaaggctatattgtgagaaccaaatgacaatatagattcttcagagtcacaataaatattacttctttaggaatgctttccttgattttccagactctcagttactttttcttcatggccttaacaattgataaataattttccaattatctgtatgttgtttcccacagacgattttaagctttatcaaaacatgcctggcatacagttagcgctcaataaatatttgttgaatgaatgaggtgacagcactttgtaaagtataaatcattagacattcagaaggtatttctattttaattggcattatcattgttcctttttgttatcacatagaggattttaaatctttagagagtccctgcctaactgtaaaaatttaattatgtggttttcatgcttttcatgccagccagaagcatgggtagcaacattgctgaaggcacctggtgggagctgagacttagagaaccaactacttggttctccagatcagcatgctgggatttaaggagttgcagctaccattagtcggatacaaggcagtggccaggaacccaggaggttgcgatatttgaagcaggtagatgctggaggttagaaacaaactaatggtaagtgctccacatagtaaggtgcaaactggacaaaagtcagtaaaaggggattcaaatagatagaagagttaaattccaagcaccagtactcgaagcatggagctatgaatatgattctgaagcaaagggtaattgaactcagtgcttccttatattcttcctgccaaaactgaaaatggtatcagaaagtgtttgcacctacttccatatacaggtccaagggaatggtagtagctggttggggaataaaagctgtgcatacaaacagactctggcagtgacaggatcaagcgagaccatttgtatacgggattgtataatattctacacaaaatgtggaagcaatcaacctttggatcacatcattctatcatgattttaaacagcagatattatagcatagtggttacaatcatggactctcacaacaggctagccgggtttaaatctggctccattatttagtagttgtgtcctgtggacaaaatttacttcacctctgtgtgccagtttcctcatctgtaaaatagggataatgatggtacctagcttcaatgggttgttgtgaagattaaatagattaaatgagttaatgcatgtaaggatctgagaacagtgcctggatgtagcaaatgctatgttaagtgttgttgttgttattattattattattattattatattattattattctttggtcatgtaagaccaatgataaaaattaatatcatttaaaatggacaaataatactctacatgttaactttacctaaaataccagtcttaaacaggaatttttctcattaaataaaaatttcacttagacctaaacatagtaaactgtataaaaaccgtaagcactagtgaagtagtaaaatttattgcagcagtcctatctgtttattctgcagaagttttattatggacattacttttaaaagttgtagggattaaacacacatttcctaatagtaaaaaacacaaactgcagtactgttggttcataagatctggtctataaggaggaatgtcccattaaatgtttttgaagctaattcaactagaagcagaaatagttgagttggaagatttttctgtagagtgattttaacatgggaaggctcagacaggggaagcctagatttgaaaaggcctggacctggggaaaggctggaagatctggactatagaacatgttagaatacctggatattgcagacactggaagacctgaatgtcagaagatcagcacactggagacgttggaagacatggatattgagccagttgatggaagactgggtagttgttggaagacatgaagatgctggaagacacagagatgctggaagacgtggagatgttggaagacgagcagatgctggaagccctggagatgctggaagacctggagatataggaagacatggatttgttggaagacgtagcttagttggaagacatatattttctggaagacgtggattttctggaagacatggcttg

SEQ ID NO: 44599 - DNA, 2300 bp, Homo sapien
tttgtagtagagacagggtttcaccgtgttggccaggctggtctcgaacttctgacctcaagtgatccacctgcttcagcctcccaaagtgctaggattacaggcatgagccactatgacaggccaaaaattttttcttcaaggtctaaaaaagtgttttcttccatctgtgtaactttctgtatgtgcttttaaagtccttgtgccattgagttatagggctttgacttctgggtctaaaaaggacaccaagttctgctatatcttaaacactgacagcaattacagcctcattttcaggcccagtagaagatgctaatcaaagtaaactgcgttcatgagatgcagggccagaaattaaaactattcaactcctcaaggcccaaggactatcgtggaagaggtgggcatgtgagattgtaagggctgatattaagagaaaagtagctcagtttctctaggaattaaccattaatatcaaaggcacactaaagcaaaaccagtatctaggttgctgtgtcagtttaacaaggctttcttggagcattaactcactccttcatgcaaaatgatgaaggttacaaggtttatagaaattatattttatactcaagatgattaaacttttattatacaatttcaaaaaaacaaacttaatttgccgcatcctgtttttaattagggcttattgtttgggatattaagcctcctctctcaaagaataaagattttcacctttttttttttttgaaacatttgagttactgctttggttaaatgaatgacttattttacaatgacccatgaccctatttcgtgatatcaagcattttaaactttttatctttgacgaactttccaaagtcaaattctaacttcattcctcattaattttttgatatgagtcctctgaagtccaaaagagacatattggtcttatttggtataaaaatcatacaagaagcatcatcaaatataaaatggtgtttgactttctttgggctgtatttatagaaatgtcattgatatgtgctccaaaattatgggaaactcttatacttctgaaataacttgtgtatgttattaattataacttttatgttaaattcttgtatgctacagaagtaaccaaaatttacttgtcaatggtggttttaataatggccgtcctggctgggtgtggtggctcacgcctgtaatcccagcactttggaggccaaggcaggtggatcacgaggtcaggagttcaagaccagcttggccaagatggtgagaccccgtctctcctaaaaatacaaaaattagccgggcgtggtggcacaggcctgtaatcccagctactcaggaggctgagccagagaatcacttaaacccaggaggcagaggttgcagtgagctgagatcatgccactgcactccagcctgggcaacaacagtgaaactccatttcaaaaagagaaaaaaatatacacccctgatttgaaacaagactaggatacacggtaaagaatgtttattcactaaagttttgacagactgaaggccattatttcagattggagataggaaacttaaaagaactacatggacattgggtaaaagaacatgggttgaaatttgcctggcagtagcccaaaagtaaatggtcttcgaggtgcatgtgaaggaactgtaggagggaaatgggataattcacatctccgccaataaataaatgtagccacactagcgtgggggatttgaggtgagacatcgaaaatactaagtcatggtgagggctggaagacaaaagaatgaatcacttcataggaatggctgtggggaagggcttgaaggaatcatcctctgacttccatgtgaaccgtgaacattaaacatggagaaatgaggagcggcggcagatcggtttgggatgcatcttcaggggatgctgaaacaacaacagcatttggtttgctctacacccctgtcacccctcgcccgcaagcccagggagtggtcagcagtggggctttgtgacgtcgaagccaccctagggctgccactggctgggacactgcctgtatgatcaaacaaagctcaagggtgtggctttgccttgtcaccaggagggtatgcatagggagggcaagagctctgggccactgcgaagattcaaaagctccaaaaacctactgtagacatcgaagaaccaatatatacaatgggccaacaatccagtgtccgcaggctgaagaggagcgtcccctgtgaatccaacgaggccaacgaggccaatgaggccaacaagacggtaagat

SEQ ID NO: 44600 - DNA, 2300 bp, Homo sapien
aaatttcgtgtgtgtacatactggctaaagttaaaggggtatcattcagtttttctgtaaatcgagcattaaaataaaagcacaatgggtttctgttaaagcactatgagccactatgacaggccaaaaattttttcttcaaggtctaaaaaagtgttttcttccatctgtgtaactttctgtatgtgcttttaaagtccttgtgccattgagttatagggctttgacttctgggtctaaaaaggacaccaagttctgctatatcttaaacactgacagcaattacagcctcattttcaggcccagtagaagatgctaatcaaagtaaactgcgttcatgagatgcagggccagaaattaaaactattcaactcctcaaggcccaaggactatcgtggaagaggtgggcatgtgagattgtaagggctgatattaagagaaaagtagctcagtttctctaggaattaaccattaatatcaaaggcacactaaagcaaaaccagtatctaggttgctgtgtcagtttaacaaggctttcttggagcattaactcactccttcatgcaaaatgatgaaggttacaaggtttatagaaattatattttatactcaagatgattaaacttttattatacaatttcaaaaaaacaaacttaatttgccgcatcctgtttttaattagggcttattgtttgggatattaagcctcctctctcaaagaataaagattttcacctttttttttttttgaaacatttgagttactgctttggttaaatgaatgacttattttacaatgacccatgaccctatttcgtgatatcaagcattttaaactttttatctttgacgaactttccaaagtcaaattctaacttcattcctcattaattttttgatatgagtcctctgaagtccaaaagagacatattggtcttatttggtataaaaatcatacaagaagcatcatcaaatataaaatggtgtttgactttctttgggctgtatttatagaaatgtcattgatatgtgctccaaaattatgggaaactcttatacttctgaaataacttgtgtatgttattaatcataacttttatgttaaattcttgtatgctacagaagtaaccaaaatttacttgtcaatggtggttttaataatggccgtcctggctgggtgtggtggctcacgcctgtaatcccagcactttggaggccaaggcaggtggatcacgaggtcaggagttcaagaccagcttggccaagatggtgagaccccgtctctcctaaaaatacaaaaattagccgggcgtggtggcacaggcctgtaatcccagctactcaggaggctgagccagagaatcacttaaacccaggaggcagaggttgcagtgagctgagatcatgccactgcactccagcctgggcaacaacagtgaaactccatttcaaaaagagaaaaaaatatacacccctgatttgaaacaagactaggatacacggtaaagaatgtttattcactaaagttttgacagactgaaggccattatttcagattggagataggaaacttaaaagaactacatggacattgggtaaaagaacatgggttgaaatttgcctggcagtagcccaaaagtaaatggtcttcgaggtgcatgtgaaggaactgtaggagggaaatgggataattcacatctccgccaataaataaatgtagccacactagcgtgggggatttgaggtgagacatcgaaaatactaagtcatggtgagggctggaagacaaaagaatgaatcacttcataggaatggctgtggggaagggcttgaaggaatcatcctctgacttccatgtgaaccgtgaacattaaacatggagaaatgaggagcggcggcagatcggtttgggatgcatcttcaggggatgctgaaacaacaacagcatttggtttgctctacacccctgtcacccctcgcccgcaagcccagggagtggtcagcagtggggctttgtgacgtcgaagccaccctagggctgccactggctgggacactgcctgtatgatcaaacaaagctcaagggtgtggctttgccttgtcaccaggagggtatgcatagggagggcaagagctctgggccactgcgaagattcaaaagctccaaaaacctactgtagacatcgaagaaccaatatatacaatgggccaacaatccagtgtccgcaggctgaagaggagcgtcccctgtgaatccaacgaggccaacgaggccaatgaggccaacaagacggtaagat

SEQ ID NO: 44601 - DNA, 2300 bp, Homo sapien
ctgggattacaggcgcccaccaccacacctggctaattttgtattttttggaaagacagggtttctccatgttggtcagcctggtcttaactcctgacctcaggtggtctgcccccctcagcctcccaaagtgctgggattacaggcatgagccaccacgcccaaccttacatttaacaatttgaagagtattttttgactctttgtgcagcgacaacttctgattttcatctcagcatcttcactctgggatgattttactcgccaaacattaatgaagcctctactctgggccagaacttttctaggcattagggatagaccagatagcaaaagcagtgtttgacttatatattctaaaatggaagcagatgatgagcaaagtactgtatatacatacgacatggtggccggtagcacaataaatgttatgtagataaatgaagcagagtaaagggttacagattgggggcagagaacagggtgctctgataggtccggtggtcagaaaagttctctctgaaagcagtaggaggagtcaggcagccaactgggatgacagccttgcaaggcagaaggaatagaagatgcaaaggctatgaagccagaactgcttgatgggtgtgagaatcagcaaggaggacagtgattagagcacagcagaaactgggaagaggcacaggatagaaggaggggccttgtaggccttggctgcaactttgctctttattctcaggtgaaactgttggaggattttgagcaggagagtgaagggatctttttttttttcttttgaaatggagtctcgctctgtagcccaggctggagtgcagtggcgctatctcggctcactgcaacctctgcctccagggttcaagcaattcccctgcctcagcctcccgagtggctgggattacgggcatgcgccaccacgcccagctaattttttgtatttttagtagagacgggtttcagcctgttagccaggatggtctcgatctcctgacctcgtgatccgcccgcctcggcctcccaaagtgctgggattacaggcgtgagccaccgcgcccggccctaatttttgttttaaaggattcccgtggctactctatggagaatatactataggaagaaaagagtgaaagctaagtgattagttgcagcagtctgggtgagaaagaaaggctaggaatcagggtggcagtggcagaaatgacaagacgtgattgaattggcaatatatttgaaagcagagccaacaattcatgttggctctagaatcagggatccattcaaagtagaaaaacaaaattatttaaaaacacaaacatcttaacagttcatttttaagtacagaataatacccagtggccaacggcactaatagcaagacaagaaatagagaatcaaagatatgtgggatgcctgcaattgactattggatgctgattttgcagaacttttctatatcttgttacttaggttttgtgtgtgtgtgtgtgtgtgtgtgtgtgtataccatattatttccctactaaagaagtcactgtttaaatactacctttttcatgaaaggcaggaccccctgagggtcttcatgattctaaaaggaagtgtgactcccacagggcagccagcagtgtcaatacttctctgagtgagatttaaataagaaagaaaatgtgttaataaaacatcaagccaagagaatctagtggccacagacccacgaaggaacactgagttgtgcaagctacctaggtagaagggtggctaatcctttcagtttgaacaaatttaccttctctgagaccggactcagcgctcgccaagtcctctgctaacgcaggccccacaactaggagctaggggagcctatcccagcctttaactgcccgccgagagacctaccacaagccggtggttcagcgacccagcgcatccttttcctggccacgccctctttgtctacacccttcccatcccggccacgcccccacgccgccgcggcccccccactcccagcctagccacgcccctcccccgtcgcgccggcgcaccgtccgtccgaatggcctcgtgggcggagcttgcgtagcctcccggaccccggcgcacaccgccccccgccccccgcccctggccaccaagcgcctccgtggacacgcacttcctgcgaggcctccgtgcgcaccttggccgagccgaaccgagccgagtcctgtccttccaggccgttcgcaatggtggatgagttggtgctgctgctgcacgcgctcctgatgcggcaccgcgccctg

SEQ ID NO: 44602 - DNA, 2300 bp, Homo sapien
gaacttctgacctcaagtgatccacctgcttcagcctcccaaagtgctaggattacaggcatgagccactatgacaggccaaaaattttttcttcaaggtctaaaaaagtgttttcttccatctgtgtaactttctgtatgtgcttttaaagtccttgtgccattgagctatagggctttgacttctgggtctaaaaaggacaccaagttctgctatatcttaaacactgacatcaattacagcctcatcttcaggcacagtagaagatgctaatcaaagtaaactgcgttcatgagatgcagggtcagaaattaaaactattcaactcctcaaggcccaaggactatcgtggaacaggtgggcatgtgagattgtaagggctgatattaagagaaaagtagctcagtttctctaggaattaaccattaatatcaaaggcacactaaagcaaaaccagtatctaggttgctgtgtcagtttaacaaggctttcttggagcattaactcactccttaatgcaaaatgataaaggttacaaggtttatagaaattatattttatactcaagatgattaaacttttattataaaatttcaaaaaaacaaatttcatttgccgcatcctgtttttaattagggcttattgtttgggatattaagcctcctctctcaaagaataaagattttcaccttttttttttcttttttgaaatctttgagttactgctttggttaaatgaatgacttattttacaatgacccatgaccctatttcgtgatatcaagcattttaaactttttatctttgacgaactttccaaagtcaaattctaacttgattcctcattaattttttgatatgagtcctctgaagtccaaaagagacatattggtcttatttggtataaaaatcatacaagaagcatcgtcaaatataaaatggtgtttgactttctttgggctgtatttatagaaatgttattgatatgtgctccaaaattatgggaaactcttataattctgaaataacttctgtatgttattaattataaactttatgttaaattgttgtatgctacagaagtaaccaaaatttacttgtcaatggtggttttaataatggccgtcctggctgggtgtggtggctcacgcctgtaatcccagcactttggaggccaaggcgggtggatcacgaggtcaggagttcaagaccagcttggccaagatggtgagaccccgtctctcctaaaaatacaaaaattagccgggcgtggtggcacaggcctgtaatcccagctactcaggaagctgagccagagaatcacttaaacccaggaggcagaggttgcagtgagctgagatcatgccactgcactccagcctgggcaacaacagtgaaactccatttcaaaaagagaaaaaaatatacacccctgatttgaaacaagactaggatacacggtaaagaatgtttattcactaaagttttgacagactgaaggccattatttcagattggaaataggaaacttgaactacatggacattgggtaaaagaacatgggttgaaatttgcctggcagtagcccaaaagtaaatggtcttcgaggtgcatgtgaaggaactgtaggagggaaatgggataattcacatctccgccaataaataaatgtagccacactagcgtgggggatttgaggtgagacatcgaaaatactaagtcatggtgagggctggaagacaaaagaatgaatcacttaataggaatggctgtggggaagggcttgaaggaatcatcctctgacttccatgtgaaccgtgaacattaaacatggagaaatgaggagcggcggcagatcggtttgggatgcatcttcaggggatgctgaaacaacaacagcatttggtttgctctacacccctgtcacccctcgcccgcaagcccagggagtggtcagcagtggggctttgtgatgtgaagccaccctagggctgccattggctgggacactgcctgtatgatcaaacaaagctcaagggtgtggctttgccttgtcaccaggagggtatatacagggagggcaagagctccgggccactgcgaagattcaaaacctacaaaagcctgccgcagacattgaagaaccaatatatacaatggacaaacaatccagtgccggcggggtgaagaggagcgtcccctgtgaatccaacgaggtgaatgagacggtaagattgttaggttctgaagtgaaggcgagagtgaaagaaagacacacagagcgggggcggctcaaaca

SEQ ID NO: 44603 - DNA, 2300 bp, Homo sapien
gtcttacagtttttagtgtggaagttttagatacttattaaattcatttctaagcattttctgcttttgaatattatgaaagtggtattttaagtttattttgcaattttggttgctggtacataaacaatagtctttttacgtcaactttgtatgctgtaaatttgctagattaactttttaattttactagttgttttgtatattacatggaattttctgtgcaactgaccgtgtcgtctgctaataaagttttaactcttttcatactaaaatgtcgaccttttatttaatattcttgctttattgctctgtctaggactgcctgtaaaaccatttcctctttggaagtcttatgcaaactgtttacaatttcacaataagtatgatactagccataagtttttatagatgatttttattggaatgaggaaattactgtctataactagattatcaagaatgttgaattttgccaagtagttttactgcatctattcaaacaatcagatgttctttatttggattattttgttaagatggtgaaatacactggttggactttaattgttaaaacattttctttttattctcagaataaaactcagttggtcattgttcagaaaaatgttaatattgtaggcctagatattagaaaggcttgcttgcaagtttggccattggatggtgtccggtaacttggattttgggagacttctccccaaacgaactgataagagtggcttactgtgcttaaaccgtacaatgtggtttatactgaacacctactttactttcgggggactggaattttggtatgccctaggcagaaagtcaccacataatcaacctctaataaacactgagtctttaaagaaattgtctggtagaaaacatttcacacattttgttacagcttgttgctgcaagaagtaagtgcgtcctatgtgactctcccaggagaagacttggaaacttattcctggttccctccataccttttctccttgctgattttgctttatatcatttcattttattacatcttaggcatgaatacaacgtctatatcctgagtcagtcctgtaagtccttctagtgaatcaccaaggctggtttttggacttggggacacttagcacagtcatgataaattacccttttgtttacttgattttatgtacttgattttgttggctaatgttttaatgattttcgtgcctgcattcatgaggtatattgatctttagttttcttttctaataatatctttgatagattttgatatcagggatttgctagtctcatacaatgagttgaggaacatttctttctcctgtttttgaaagaatttatgtaaattaggtattatttctttaaatatgtcagaagtcactagtgaaaacattggagtctttttgtggaggggagttaaattacatatacataatataacatatataacctttaaaagttcaatttttaacagattttgggctgtttgtatatttgtatatctcaattcattcttatattagtttttgtaagttgtatttttcaagtaatttttttattgagtctgaattttcaaatttattggcataaagttgctctcatttttttttctttttcttgagacagagtttcactgtcgttgcccaggctacagtgcagtggcatgatctctgctcactgcaacctccacctccctgggtcaagtgattctcctgcctcagcctcccaagtagctgggaatacaggtgcgcgctaccacgcctggctacttttgtagttttagtagagacggggttttaccatgttggtcaggctggtctcagactcctgacctcaggtgatccgcccgccttggcctcccaaagtgctgggattacaggcgtgagccaccgtgcacgaccagcttgctctcatattccattagtattatttcactttcagtagggccggtagtgctgttatgggcgtgtctttgcgtccagagctaccaagatggcggcaagcctcttgctctctgacctggggttcttggcctcacggattccaaggaagggaaccttgggccacgcggtgatccgtacagttctgttagaagcccggggttatggaagagaagcgtggaaaccagcgaccagcgttcaggtagattaggaccaaccccggcacttagctgcacaggaacaatggcgagcccctttgggcgcctcactgatcagaagggcagaggacaccctgctggatctggaggagtggaagtcaatggcgggtctgcgagggcggcgttc

SEQ ID NO: 44604 - DNA, 2300 bp, Homo sapien
tctttattcctttgagatacagtcttgctccgtcgcccaggctagagtcgtgcagtggcgccatctcggctccctgcaacctccgcctcccatgtacaagcaattctcctgcctcagcctccggagtagctgggactagaggcacgtgtcaccacacctggctaatttttgtatttttagtagagacagggatttgccacgttggccaggctggtctcgaactcctgacctcaggtgatccatccacctcggcctcccaaaatgctggaattaacaagcatgagccaccatgcccaggcttcctttttcttaaataaccagttattttattttagaacaaaaatttactatacaagattcttgctcagataaaattattttccttttaaccttttgtgccaaaaatgcctgttcataacttccttcacattgtttttattcactgattacctaatttcataaataacttttaaataagcttcgaattagacaaaaagtattttcctttaagatcacatttcttttttacagaaaaatgttatcctataattaaaaaaattggaaatgacccagacgtgtaataaatatctattatttagcttaatataactttggattttaaattatatgacaagataatctacaagaacttattctgttacatttgtgtaattaattaattttctaatagtttacccagattacttatgaaaactgtaatagttaccatttaaagttatgtccttgttaaccatttttataacctgtgaatttcaggttgtcctgagtaagaacattaaggttagataaagggtcgtttttttgttcgtttgtttgtttttgtttttttggcaataactcaggatttagctattttcattaaccaaacaatattaaattccttacttactaaatcttacataaacaaagataattcttatttgagctgcattcatagctttagaaccctcatgccaaatgttgacatctagcagagataaataatgtatgttgagaattccaaagccatttctaattcaatttcactaaaatttttaaaaccagcttgtttattgaagatttgcttaagtcacatgaacttgaaaaagcatttggcttaaagtctatttttccgaaaagcattagatttaagtgcctttgttaagccaattaattagagcttttttctacattttaagtagtgaaatgtcatatccatgacacataaatacatagatgtattagacatgtagatagaagtagatcttataaattcctaaggcctttattttttcctcgtattttagatttacaatttcttcataacctattttattgccctaggcaattgtcagctagatagccctaaatgtgcatattaaaggaacccttaggtaaaaaaaatcagatagtgaaatttgcatctcaaagcaccgagagaaagagtctggtgatgttagagggagattgaagatggatgccaaatcaaacacaaaattgtagaaatatattataggattgtataaggagaccagttgtatttagatagggactacctgtcttttaactggatctctgagctctgggcagagcccacactgaatcctaggtctccaaaaagggagaattactatgaggctacaccaagtgacggttttacagtgtacttttttttttttttttaacaaagacatttctaagtgtccaagctactttcttccttaaaaatccaagaatactctctgttctaataactgttttagtcaaaaacttagaattaccattcatctcagcagtagcccaaaagtaaatggtcttcgaggtgcatgtgaaggaactgtaggagggaaatgggataattcacatctccgccaataaataaatgtagccacactagcgtgggggatttgaggtgagacatcgaaaatactaagtcatggtgagggctggaagacaaaagaatgaatcacttaataggaatggctgtggggaagggcttgaaggaatcatcctctgacttccatgtgaaccgtgaacattaaacatggagaaatgaggagcggcggcagatcggtttgggatgcatcttcaggggatgctgaaacaacagcagcatttggtttgctctacacccctgtcacccctcgcccgcaagcccagggagtggtcagcagtggggctttgtgatgtgaagccaccctagggctgccattggctgggacactgcctgtatgatcaaacaaagctcaagggtgtggctttgccttgtcaccaggagggtatacatagggagggcaaga

SEQ ID NO: 44605 - DNA, 2300 bp, Homo sapien
gctaaaaatgtttttttttctttttctttttttttttttttttttgaggtgaggtctcactctgtcacccaggctgagagtgcagtggcacaatcttggctcactgcaacctcccccttccaggttcaagcaattctcctgccaccacgccgggctaatttttgtatttgtagtagagacagggtttcaccgtgttggccaggctggtctcgaacttctgacctcaagtgatccacctgcttcagcctcccaaagtgctaggattacaggcatgagccactatgacaggccaaaaattttttcttcaaggtctaaaaaagtgttttcttccatctgtgtaactttctgtatgtgcttttaaagtccttgtgccattgagttatagggctttgacttctgggtctaaaaaggacaccaagttctgctatatcttaaacactgacagcaattacagcctcatcttcaggcccagtagaagatgctaatcaaagtaaactgcgttcatgagatgcagggccagaaattaaaactattcaactcctcaaggcccaaggactatcgtggaagaggtgggcatgtgagattgtaagggctgatattaagagaaaagtagctcagtttctctaggaattaaccattaatatcaaaggcacactaaagcaaaaccagtatctaggttgctgtgtcagtttaacaaggctttcttggagcattaactcactccttcatgcaaaatgataaaggttacaaggtttatagaaattatattttatactcaagatgattaaacttttattataaaatttcaaaaaaacaaatttcatttgcccatcctgtttttaattagggcttattgtttgggatattaagcctcctctctcaaagaataaagattttcacctttttttttttttcttttttgaaatctttgagttactgctttggttaaatgaatgacttattttacaatgacccatgaccctatttcgtgatatcaagcattttaaattttttatctttgacgaactttccaaagtcaaattctaacttgattcctcattaattttttgatatgagtcctctgaagtccaaaagagacatattggtcttatttggtataaaaatcatacaagaagcatcgtcaaatataaaatgctgtttgactttctttgggctgtatttatagaaatgtcattgatatgtgctccaaaattatgggaaactcttataattctgaaataacttctgtatgttattaattataaactttatgttaaattgttgtatgctacagaagtaaccaaaatttacttgtcaatggtggttttaataatggccgtcctggctgggtgtggtggctcacgcctgtaatcccagcactttggaggccaaggcgggtggatcacgaggtcaggagttcaagaccagcttggccaagatggtgagaccccgtctctcctaaaaatacaaaaattagccgggcgtggtggcacaggcctgtaatcccagctactcaggaggctgagccagagaatcacttaaacccaggaggcagaggttgcagtgagctgagatcatgccattgcactccagcctgggcaacaagagtgaaactccatttcaaaaagagaaaaaaatatacacccctgatttgaaacaagactaggatacacggtaaagaatgtttattcactaaagttttgacagactgaaggccattatttcagattggaaataggaaacttgaactacacggacactgggtaaaagaacatgggttgaaatttgcctggcagtagcccaaaagtaaatggtcttcgaggtgcatgtgaaggaactgtaggagggaaatgggataattcacatctccgccaataaataaatgtagccacactagcgtgggggatttgaggtgagacatcgaaaatactaagtcatggtgagggctggaagacaaaagaatgaatcacttaataggaatggctgtggggaagggcttgaaggaatcatcctctgacttccatgtgaaccgtgaacattaaacatggagaaatgaggagcggcggcagatcggtttgggatgcatcttcaggggatgctgaaacaacagcagcatttggtttgctctacacccctgtcacccctcgcccgcaagcccagggagtggtcagcagtggggctttgtgatgtgaagccaccctagggctgccattggctgggacactgcctgtatgatcaaacaaagctcaagggtgtggctttgccttgtcaccaggagggtatacatagggagggcaaga

SEQ ID NO: 44606 - DNA, 2300 bp, Homo sapien
tacagtctttaatgatctgagataggaagaaggtaaaaagcctcacataattcagcagatagtgaaattaggtctgcactcctgtagacagagtagcagacttgctgatggtaacagctttgtctttctgcacagtttctctgttgatgaaccaagataatcctaagctttcttaaagaatatttaaaggaccataattttggttatgctaatgtaatgaaatgcagcttatgccaaaaacaatatgagaagcttggttacagtggttttgaaaattctaaattttgctggaacgtttttcatttacacaacacttctgtaaaatagctctgtaatagaatctgactccatgttttacatttgacggctaacaattttcacgacccaccgcttcctcttcctcttcttacctagatctgataagaaagcccaggtgattccttctttagggctagtgtgaaggtcaaaccatgcaagccctagtctgtgtgtgggacactcataccagctttaccccctaaccgtcataaaagccaagccattttttttttttttctctctgttctctcaagcattcttttacctgcttggaaacctgtcctgatctccccagaaagcctcattatgtgagtaataaaattttccattcccttttggtgcgtgtatcatcagttttgacatccaaaccaaatttttggtgtggaatccatcctgtcacattgaatctgtgaacaggatatctaggcactcttcactaccaccagggatcttttttctcttgctttagcttcctaactggcactgctacctgctggtgacatgcagtttgagctactgcctgcggcctagcttgtattttaaactgtactgctttgtgcagcattggtagggttctaccaagcctatgctaaagatttcaacaacgtaagtcagcagtttaactaattgacatttattgacaggaatattgggttggagcccttcttaatgcagccctgaatcttgtgtttcagcctggatctgtgaattcagattgaatcatgtgtctcaattccaatataagatatgactgaaactaggctcaaggataaactcttccgtttttaccatcagttgtttctaaaccaggtgttagtattctttctttagacagttgaggagaaagactgagagtctcttcaatatataggcccactggttggtcactcatatggagggagagcagttactatttgaaatgctgagaacacactcctaaaagcagataactcactaggagctttaaaaatgcttcttgcgatactgtttaggtcagtgtcacaaaaaagattttgatcatcagagttttagggagaaacatccatgacacccttgtggaaaaaacggattcattcaaccattttcatgaaggagtcccataatcctgatgatattgacttgatatgaggttctctgaaagaagaaacttatatgaataaggtagagaggaatgtccatgaattgtatgcagtaaccacacacacacacacacacacacacacacacacacacacacacaccttgggaaagttgcctggtagaggcacgtgttgttggagaaaagtgagataactcacatctgtatttagacttaaatatgggtacactggctcagaaggattttcgataagacatacaaaatatccagtattggtgaaggctgggagacaacagaatgaatgactgattggggtagccatggggaatgccttgggggaaacacccttctaagccatgtgacacaccacaattaaactaggagagacaaagaagggtgagaggtcactttggaatgacccttattggtgttgaggaagctctcctttttctctaaccagaccatttagactcctctgtaccctgtccctccccgcatggaattgtcaggagtggtgctttgtgatgtgtaagccatgaaattgtcaggagtgttgcctggtgatgtctaagccaccccagggctaccactggcagagtaatttcttgctggccaatcaaactgaagaatgtggaatctcattgtcctgaggagtatatatagagagagatcatgaggcctggagtaggctactgttgctctagggtggcaggggttagggaaaaatcaggagaggctgtaggctactgttcatctaggatggcagagtttagtgaagaagaggaagacactgtacgctactgttgttctacaatagaagatgttcctgaagaaataaaagaggctatagcctacttttgctctaagatggcggagattaaca

SEQ ID NO: 44607 - DNA, 2300 bp, Homo sapien
tttttgtatttgtagtagagacagggtttcaccgtgttggccaggctggtctcgaacttctgacctcaagtgatccacctgcttcagcctcccaaagtgctgggataacaggcatgagccacaatgacagggccaaaattttttcttaaaggtctaaaaaagagttttcttccaacataatattccgtacactgcagatggtcttttattttgcttattggtaactggcctaagagattttacattttattgaaataattcctatgtcattattataaacttctggattgcttagaaaaaaaacataaaaaattttttacttaaggtcattacatctgtgtaactttctgtatgtgcttttaaagtccttgtgccattgagttatagggctttgacttctgggtctaaaaaggacaccaagttctgctatatcttaaacactgacagcaattacagcctcatcttcaggcccagtagaagatgctaatcaaagtaaactgcgttcatgagatgcagggccagaaattaaaactattcaactcctcaaggcccaaggactatcgtggaagaggtgggcatgtgagattgtaagggctgatattaagagaaaagtagctcagtttctctaggaattaaccattaatatcaaaggcacactaaagcaaaaccagtatctaggttgctgtgtcagtttaacaaggctttcttggagcattaactcactccttcatgcaaaatgataaaggttacaaggtttatagaaattatattttatactcaagatgattaaacttttattataaaatttcaaaaaaacaaatttcatttgcccatcctgtttttaattagggcttattgtttgggatattaagcctcctctctcaaagaataaagattttcacctttttttttttttcttttttgaaatctttgagttactgctttggttaaatgaatgacttattttacaatgacccatgaccctatttcgtgatatcaagcattttaaactttttatctttgacgaactttccaaagtcaaattctaacttgattcctcattaattttttgatatgagtcctctgaagtccaaaagagacatattggtcttatttggtataaaaatcatacaagaagcatcgtcaaatataaaatgctgtttgactttctttgggctgtatttatagaaatgttattgatatgtgctccaaaattatgggaaactcataattctgaaataacttctgtatgttattaattataaactttatgttaaattgttgtatgctacagaagtaaccaaaatttacttgtcaatggtggttttaataatggccgtcctggctgggtgtggtggctcacgcctgtaatcccagcactttggaggccaaggcgggtggatcacgaggtcaggagttcaagaccagcttggccaagatggtgagaccccgtctctcctaaaaatacaaaaattagccgggcgtggtggcacaggcctgtaatcccagctactcaggaagctgagccagagaatcacttaaacccaggaggcagaggttgcagtgagctgagatcatgccattgcactccagcctgggcaacaacagtgaaactccatttcaaaaagagaaaaaaatatacacccctgatttgaaacaagactaggatacacggtaaagagtgtttattcactaaagttttgacagactgaaggccattatttcagattggagataggaaacttgaactacacggacattgggtaaaagaacatgggttgaaatttgcctggcagtagcccaaaagtaaatggtcttcgaggtgcatgtgaaggaactgtaggagggaaatgggataattcacatctccgccaataaataaatgtagccacactagcttgggggatttgaggtgagacatcgaaaatactaagtcatggtgagggctggaagacaaaagaatgaatcacttaataggaatggctgtggggaagggcttgaaggaatcatcctctgacttccatgtgaaccgtgaacattaaacatggagaaatgaggagcggcggcagatcggtttgggatgcatcttcaggggatgctgaaacaacagcagcatttggtttgctctacacccctgccacccctcgcccgcaagcccagggagtggtcagcagtggggctttgtgacgtcgaagccaccctagggctgccattggctgggacactgcctgtatgatcaaacaaagctcaagggtgtggctttgccttgtcaccaggagggtatacatagggagggcaag

SEQ ID NO: 44608 - DNA, 2300 bp, Homo sapien
tgagacagatagttctgtgggcttttttgagggggtgtcatcttgctgaatttagaatgattagcagcattcctagtttctattcaatagatgccgatagcaccaagagccatcccagttgtgacaaccaaaaatatttccagactgcaaaatgtcttcttgggatggggtgcaaaatcacccccaatctgagcactactgagctagaggaatgaaaaggacattgtgttggaagagggtagggacttaagctttgaaatgttgttcatagcttggaagaggcccaccttagccgtttctgccattgggtgaactaggctttttgtgcctaggtgttagtgaatggatgtcagagcagaaggtaggagacaggagaagagtcttctctatttagagggaatggaaaagatgcagggcagtgtcagaaggtttcagatctctcatgagcaaatgcaaaacttctgtgttctcaagaccggaaacacatttctcagccaagggaagaggctaattgagaggagtgatcgtggctcttcttcattttcttagtaagctcctgaaggtggcaagaccgcagaaaagcaatgcatttaatacctcagggacttgttagtgcctgaaattgaacatggaggcattgggatgatttcattgtgcctcagaagttattaaactgagtcaggcaagtctgcactctggctccccatgtgcaggtgcaagcagtggccccagtggggatccgagggcagttccctggctggtggggtaatgttccaggcaggaacacagctgcctctgctgcacaaaaaatctgcctgaaaagtgggaggcagcaggttgtaataagccccactcagctcccacacacttggcaagtcagttttcatacccacagtgttctgctagcagcagcagctaactgggtttcaagtggcccgtgctcagaatttaaaaccatcccaggccataagctttccctatggacacagaaaccatatctttcaggctgcatcctttccagtccacctgtgaagcagggccatgcagctcatgtgccttgttgccgtagcacacttctcacttgcccctcggttctggccaatcagctttgtccttactaaggattatatcacaaatcccagttgggctcttctctcaaactgtgactgcagcctgagttagacttctgcaacgtcccgtgaggtgggatcaggaatggcttccctccattcttgctggaatctgggtctgcacacaaagcatgtcccgatgctgctccttcttatatattccttacttttcactgaatcacctctagagctgagtaggtttgaagtcctccctcatgacttgtattgcctggctcgcctgtgggagtatatgtcatgacagcaatctatccctctctcatgctctggggactaatggttttccatctgttttatgatgtagtctgttgcctgccacttcattcaaagggtctgtggtttctttcagtttttctgttaagttcttacattgtttcttcgaataaattttacagcatgaatctctacatgccattttgtcttaccaagtgggataagtatgcttataatgcttccaatctgccatcttggaaaaaaagaaaaaaaaaactttaaatattttgtctgtaatgtgctatggaagagaccttttcacattgtatctgtttaggaattgatgggcctcctgtatctcaatgtctaagtgtcttgctcgacttaggaagtgtcatctattatttcaataaataggtctttgaaaacatgttttctctctttgccttctgggctatcagtgatttttatatttggtcactttatgttgttagatagattccaaaggtttattttattattttctttttttctttatttttgtctgacagcgttatttcaaaaaaaactgtcttcaagcaaaatgtgatcttaacataagtcagttatgattgagtatattgttgaagctttcatgtgtattttttagtttattcactgcattctttggctccagaatttctgttcgttccttttttatggtctctatctctttggtaaagacagggtggcagtggccatgctgctgccctgccactgggtgttggatgccaccttcagtgatggcagtctaggccagtgggtgaaaaacacatgtgccacatatgccttatccccagtggtgctcccacctcagccccaggtgtggtagcccatgaatgctcatgtctaagccccaggttaacagccagctcttcttttgcatctcagcctcagtgt

SEQ ID NO: 44609 - DNA, 2300 bp, Homo sapien
tattattatttaataataatgattattattattccccataattgtctatggggaaatgattcatttattcacaaacacattttatcagagttttaaatgtttgtcaaacttatgggggcaaaccctaggtgactttgggtttggtgatgacttttttagatgtaacaccaaaatttggttaaacttatgggtgcaaaccctaggtaaccttggttttgatgacggctttttcagatgcaacactaaaagtaccagctacctaagaaaaaagagataaattggacttaattaaaactaaaaacttttgctctgaaaagtcactgttaagatcttgaaaagacaagccagcgactggcataaaagttttgtgaaacacatatctgataaaagatgtatatttaaatatgcacaaaacgctgaaaacccaatcataagaaaacagaaaacccaatttaaagtggacaaaaactataaataagtacacaaacaatgaatatataggaatttaaaatgagcatattaaagagttcaatgtcatatggcattttagagaagtgcaaattaaagcacctaggagatagcgctctacacccaggagaatggctgacgtccaaaacactgaaacatcaaatgttgacctgtatgttgagcaacaggagctttcagtcattgttagtaggacagacctggaggaatcataaaagcataaggctaagtgaaagaagaaaatcttaaaaggctacataatgtatgattccaatcatacaatatttagaaacagttcattatgaatacactaaaaatatcagtggtttccggaggctgaggagttagggttggggcaagggggattgataggtggagcacacaagagatttaaaatggtgtaacaagtctgtgtgatactgtaatgatgaatactcaccattacacacttatcaaaacctacagcatccccaacgttgagtgattcctgatgtaaactgtggacttgacctaataatgaggtatcaatacaggtccatcagttgttgcaaacatgccataataatacaaaatataaataataggagacactgtgtgtgtgtgtgtgtgtgtgtgtgtgtgtgtctgtgtgcgtgcatagggcagggcaggagggcaggaattgggggggggggcgtagatatgtgagaactctgtaactttgatgaagttttctctctgtatttttggattagcaatgctctaaaaatgatgtctattagtttttaaaaagacacaaatgatttgaagagaatataccaatcaggaaaaggcatataaaaagatgaccaacgtcatttgtcattaggaagatgcaaacaaaaaacaaaggagattcaaatacaggcttattagaatggctgaaatctgaaaatctaaaatactaaatggaagaggggatatgcaacaagaggaattctcattccttgctagttgagatgaaaaatgatgcagccagacttttaaatccatgttttgtggacctactcatatgacaaattgtgaaagttaaaactatatgaactgcaaacagagcatagttgctagagtctttggagaagtgccttgactgacctcaaaagagatgcacaggggacttttcgggtgatggaactggtcagtgtgacacttggttcgtagatatggaactccacgcatttgctaaaatacatataatttcacataatagttaaatctgatgagtgtattttaaaaattaataaaaattataataaaaattaatgacattaaattaataaaatgttaaaaataatttttttaaaagatcacgcacaggctgctgaaaagacaatggatttttctgggacaaggatagggaaagaagaaaactaagggagcctttgacataggtcaggagagagattctattaacttcacacacggtagtacttaaagtagaaggttttggaatggattttagaggatgacagaacaactgttgctgtcgggacaggagaaggggggagtgccggccctggaaggagtaaaaccttgaggaagactgaggggccttcccacctcatttcagacacggggcagcttcagttaagcagagaaaggagccccggggctggccaacaagcaagaagggaactctgtggaaggatagctatctcccaacacggagggaaggcccaggcgtcgcccagccactccttgctgtcacccctggacaaaacagatggagaggtgaaaacggagaggtgggcagggagaggtgggcgaagggcagggaagtggacaggaacaggtgg

SEQ ID NO: 44610 - DNA, 2300 bp, Homo sapien
aaaaaagaggtagaaatcacaattctcccttttggaaagttcctccaaaattcagccccctattcagaagtttccacaattaaccgtgtggtgtttaaatttaaaagctgatttagaattttgagaagattgatgtggtttttaaagtaaaatttatacatatatgagcttatgtatgtgtttataactacacatgggtaataatatacatataggtctgccacttccctttccactattatagattcaattgcacccccactgaagtcttatgttgaaattaacatgtggcattatttggagacgggattatctcagaggcaaggaagttaaaatgtggttattaaagaagagctggtactattcctatgcaaacatcctttgtttattaataaacatactttattcacatttatttccttgtcacgaaagtctattttctgtcccaagataccctgaggatacgccattacacttgttcatcatgtctctttaaatgccctttggctgtgccagttcactgagacttctcttgattttgaaaacattgacagtttggaggtgtatggtcaggtattttgtaaaatagcctttgattgggaattaagtgattattttttatgatttgatgtaggttacgttttctcggaagatgaacagagaagtgaagtgccattcttatcatatcataccgacggcacataataccaacacaatttgtcactgatgatgttactttgatcaccatggtgacctagtgtttgtcagttttcttcagggtaaagtcacattacttttttccctgtgtcatactgtcatcttgggaaggataggaagacccaggaccagccagtagtcagatgaggcctctgagggaaaactgcagaaacctcctgcccacaaagaagaggatccacagaaaccagctccccacctgttgtcatccctgggaggcccaggggcatgttgacccacagtgctgtcccctgacgtcttagcgtgtagaaagaggagaaggctgtgcttaggtgagtctcacttcagatcatgagagcggaagatcaggaggggggccttctaggcatccccaggctgatacagaggatggactggtgagctaccccaccacggacacaggaggatccccaaaaacctgcccgttttcactgctaggaggccttgggcagggccattagggagagacgctagcgtgctccagtccctcttggggggttcatggaaatgggaaccttgatctgaaaaacagtccctggagagaagagggagggagtggaggccgtatcaggaataataggttgaggaagactgagggtccctcccatgccatttcagacggagggcagtggagccctacctggagtctgggaggccataccccactgtggatggatgtgattctacctctcttgcaccttgcaggtctcaaggatgggaggggcttattcggaggtgaaagactcagatgcatagaggcagggagcccagacaatgtcaggagtccaggaacagcctctcaggaaggcaggaagggaacacccatgactggtagtgctgcctgtcctgtccctgtgcctgctgccagccatggaggagcccatcagggtccccagatttacaaatttctgacttccattttgggagtcagccagaggggagattttctctgaggagggcagcttcagttaaacagagggagtagccccagggctggccactcaacaagaagagaactctgtcgaaggacagtgacctccgaacacgggggaggcacaggctgcaccctgccactccctgctgtcagccctggaaaaaggtggggtgtgagtgtcaaggactggggaggtgggagggaagaggtcagcagggcttagggagtgagcagaaaggtttggagcacatcctggaggtgggaaggaagggatggaaaggaggctgacaagcgggcggcggggggggggcgccttcctcctctgagaggaggccccgccccacgctatccgggctgtcagccctgatcaaccctgacagagttcccggatgtgctttgccggatgtgctttcccggcggccatcttgggagtctgaaggacctgaggcattttgtgacgaggatcgtctcaggtcagcggagggaggagacttatagacctatccagtcttcaaggtgagggccccgagggagaagtgagggacaaccccaccacagagagaagcagccctggcctgccctatccctgcggtggcacttgtaggtggcggaaacgaagatggtagccgag

SEQ ID NO: 44611 - DNA, 2300 bp, Homo sapien
ttggaaaagttaaaagtataggaactgaaaacagaagacagttgctaggagctttgtagaagtgcggtgattgacctcaaaagggatgcacaggagaagtttaggcaggtggaactggtcagtatgatacttggttggtagatatgggagtccatgcattttccaaaatacatataacttcacattctagttaaatctgatgtgtgtatttaaaactttaatcacgtattggttttttaaagggtcacgggttgctgaaaagacagtggtttttttcagggactaggataggaaaagaagcaacaataaggaagcctttaacacagggtatgggagagatgacactaatttcactcacagcagtaaagtggaaaaacttggaatggaatttagaggtcgaaggaacaaatgttgctgtctggacaggagaaggaaggagtataggctcttttaggagtcataccttgagaaagacagaggggcattcccaccccatttcagagggcagtggaggcctgccttagggctaggaggccctatcccactgtggatggatgtgattctccctctcttgcaccttgcaggtctcagggatgggaggggcttattcggaggtgaaagactcagatgcacagggtcaggcatcccaggcagtatcaggagtccaggcacagcctctcaggaaggctggaagggaacacccatgactggtagtgcccctcccctgtccctgctgccagctctggaggaccccatcagggtccccagatgtacaattttctgacttccattttgagagtcagcagaaggggaggctgttgtctctgaggagggcagcttcagttaagcagagaaagaagtcccagaactggccaaaaaacaagagagatgtggaaggacggtgacctcccaacacggaggggaggcgcagactgcaccaagccactccctgctgacacccctggaaaaaggagagtggggtgtcaaggactggggaggtgggagtgaagaggtccgcaaggcttagggagtgagcaggaagggttggagggcagctgggaggtggggaggaagggatggaaaaaaagcagagaggtggggggtggttcctcctcagagaggaggccccgccccacattgacgctgcgtcagccctggacaaccacggcagggttcccggatgtgctttcccgacggccatcttgggaatctgacggatcgaaggcatttgtgaggaggcgcgaatcaagttagcggggggaagagtcttagacctggccagtcctcagggtgagggccctgaggaagaactgagggacctcccaccatagagagaagaaaccccggcctgtactgcgctgccgtgagactggtaggtcccagacagggaaatggccccagaagaagggaggaggtgccggccctctagggaataaataggaagacactgaggagggctgggggaacccccacctcagagggcagattcccagagattcccaccctgctcctcaagtatcagccctcgtagagctccccagtcagctcaggcggggtggcagccatcttattcctgggtgagtggcgtaggggaggcggaggccttggtctgagggtcccatggcaagtcagcacggggagctgcctctggttggcagagggaagattcccaggccctgctggggataagactgaggagtcacatgtgcatcagaacggacgtgaggctaccccgactgcccccatggtagagtgctgggaggtggctgccaccgccctacctcccactgctctcagggatgtggcggttgctctgaggttttgccttaggccagcagagtggtggaggctcggccctctctgagaagccgtgaagttgctaattaaattctgagggggccatgcagtccagaactatgaggctctgggattctggccagccccagctgtcagccctagcaggcccaagaccctacttgcagtctttagcctgaggggctccctcacttcctcttgcaggtgctccaggaaccaggtggtgacgaactgggtgtgaggcacacagcctaaagtcagcacagcagaggaggcccaggcagtgccaggagtcaaggtgagtgcacaccctggctgtgtaccaagggccctacccccagaaacagaggagaccccacagcacccggccctacccacctattgtcactcctggggtctcaggctctgcctgccagctgtgccctgaggtgtgttcccacatcctcctacaggttcccagcagacaaactccctaggaagacagg

SEQ ID NO: 44612 - DNA, 2300 bp, Homo sapien
atgctgggtgtatagcgctctacacccaggagaatggctgacatctaaaacactgaaacatcaaatgttgacatgcatgttgaccaccaggaactttcagtcattgttagtgggatagacctggaggaatcatgaaagcatattgctaaatgaaagaagaaaatctaaaaaggcttcctagcataccacattctggaacatgcaatgatgaatacactaaaaatattactggtttccaggggctgagggctggggttggggcaaggggaattgattcattaggtggaacacacaggagctctaagatggtgaaacaattctgtgggacaatacaatgatgaatacttgccattacacccttatcgaaatgtataatatccccatcgttaagagtgagtcctgatgtaaaccatggacttaagtgtgaggtatcaatacagttccatcagttgtagcaaacatgtcataataatacaaaatgtaaataaaaagatagactttgtgtgtgtgtgcagcaatcagggcagggcgggtggtgtagattatgtaggaactctaattctgatgaagatttctctttgtatttttgaattagcaatgctctaaaaatgaagtttattcatctataaaacgatgcaaatgatttgaatagacactttacgaaagggaatatagcaaacggaaaaaaagcatataaaaagatgaccaatgtcatatgtcattaagaagaggcaaacaaaaaccaaagaaggttccaatacatgcttatgagaatggctaaaacctgaaaatctaaaatactcaatgtaagagaggatatagaataacagaaattctcattccttgctagttgtgataaaaaatagtacaggcacacttttaagtcagtattttatgaagctaatcatatgacaaattggaaaagttaaaagtataggaactgaaaacagaagacagttgctaggagctttgtagaagtgcggtgattgacctcaaaagggatgcacaggagaagtttaggcaggtggaactggtcagtatgatacttggttggtagatatgggagtccatgcattttccaaaatacatataacttcacattctagttaaatctgatgtgtgtatttaaaactttaatcacgtattggttttttaaagggtcacgggttgctgaaaagacagtggtttttttcagggactaggataggaaaagaagcaacaataaggaagcctttaacacagggtatgggagagatgacactaatttcactcacagcagtaaagtggaaaaacttggaatggaatttagaggtcgaaggaacaaatgttgctgtctggacaggagaaggaaggagtataggctcttttaggagtcataccttgagaaagacagaggggcattcccaccccatttcagagggcagtggaggcctgccttagggctaggaggccctatcccactgtggatggatgtgattctccctctcttgcaccttgcaggtctcagggatgggaggggcttattcggaggtgaaagactcagatgcacagggtcaggcatcccaggcagtatcaggagtccaggcacagcctctcaggaaggctggaagggaacacccatgactggtagtgcccctcccctgtccctgctgccagctctggaggaccccatcagggtccccagatgtacaattttctgacttccattttgagagtcagcagaaggggaggctgttgtctctgaggagggcagcttcagttaagcagagaaagaagtcccagaactggccaaaaaacaagagagatgtggaaggacggtgacctcccaacacggaggggaggcgcagactgcaccaagccactccctgctgacacccctggaaaaaggagagtggggtgtcaaggactggggaggtgggagtgaagaggtccgcaaggcttagggagtgagcaggaagggttggagggcagctgggaggtggggaggaagggatggaaaaaaagcagagaggtggggggtggttcctcctcagagaggaggccccgccccacattgacgctgcgtcagccctggacaaccacggcagggttcccggatgtgctttcccgacggccatcttgggaatctgacggatcgaaggcatttgtgaggaggcgcgaatcaagttagcggggggaagagtcttagacctggccagtcctcagggtgagggccctgaggaagaactgagggacctcccaccatagagagaagaaaccccggcctgtactgcgctgccgtgagactggtaggtcccaga

SEQ ID NO: 44613 - DNA, 2300 bp, Homo sapien
attgttcatctctagacaacatctgggattcactaagaaaaatgtgtaccttaataacaatgttcttctggtttcttagattttagatggaactcatgggaatgctataaattggttgtgtttggaggtcagcagggtactttgctaggatttcttgattttatggggtatgaaataaagatatgtgagctcgatgagcactggaacaaaaatctagggtctactgctctttcattttattttattttttccattattgatttttgtgacttcctatagagaattggacaggtgtcaacctgggagagaaatctagggccatgcctcctctatctttggcactctctcttcctctcttttaaaatatttttatttttctattttgaaacaattataagttcacaagaagtttcaaagatatgtacatagaggccttatgtatccttcaaccagcctctcccaatggtaaaatcttcagtacgctaccacattacactatcaaaactagaacactgacattaatacaatccagagctttttaagattcaacacttttcttttggctgttctaggcccattacatttccatatgaatattataattatcctgtcaatttctattaagaaacctttttagaatttgtattaggtttgagttgaatctacagatgaatttggaaataactgacatcttcaatattgaatcttctaaccgaaaatcaaagtatacatctcgatttttccttatgttattatctttgcaattttttgtagttttaactgtgcaagtcatttacatttttgttcagatttatccctaagccttaatattttttgagatattttaaattgcactgtgcttaatttcaaattccggttgttgaaattaactaccagtcgaccctaggactaccattggctgaaacactgactgttctaatatataaacttctaatatataacttctaacatataaacatacaattgatttgtgtgttgatcttctatcctgcaatcttgctaatctcaattattgtcaaagcctttttttttttttttttttagatcgacttttctacacaggctctcatgtggtctttgacaaaggatacttttacttctccccttccacactaaatgccttttgtttttcttttgcactggacacaatctccattacaaaatgtaacaatgcccacactggtgtacatgttggtgttagatagtattctgcatgtaaacactcagaacaacttccagcacatgtgtacccactcctcccccaaccctacacactggtaaaaaccatgttgtgggagactacatttgctatgaacatacacccctgatttgaaacaagactaggatacccagtaaggatgtttattcactgaagttctggcagactgaaggccatgatttcagactagaaataggaaacttaagaggactacatggacattggaaaaaagaacatggattgaaatttgcctggcagaaacctgaaagttaatggtcttcaaggtgcatatgaaggaactgcaggagggaagcgggataattcacatctccaccaataattaaatgtagccacactagcttggagggatttgaggtgagacatctaaaatactaggtcatggtgagggttggaagacaaaagaatgaatcacttaataggaatggctgtggggaagggcttgaaggaatcatcctctcacttccatgtgaaccatgaacattaaacatggagaaatgaggagcggaggcagatcagtttgggatgcatcttcaggggatgctgaaacaacaacagcatttggtttcctctacacccctttcacccctcccccacaaacccagggagttgtcagaggtggttctttgtgatgccaaagccaccctaggactaccattggctgggacactgcctgtatgatcaaacaaagctcaagggtgtggcttcgtcttgctcccaggagggtatatatacagggtgggcaaaagctctgggacagcccactggaaagcttcaatacagctgtggaaatctgcaccctagaagatcctagtacagaaattctacaaccaaccataatcatggaagagccaacttccagcaccaacgagaataaaatgaagagcccctgtgaatctaacaaaagaaaagttgacaaggtcagattgttaggttttgaagggaaggtgagggtgaaagaaagacacacagatagggcgcgggtcaaacagcaacacgggtatactgcagacacctgcagaaatgtggggccagcttcatg

SEQ ID NO: 44614 - DNA, 2300 bp, Homo sapien
atgacacgacagtttgatgttctcactgttaattgcaggcaaaagtccaaaagaaataaatacttagatgttagtttgtaagaatttactaaatggagttgttaatctgtagacaacatctggaattcactaaggaaaaaaaatgtatacaaggttcgcttggtttgttagtgtttagatggcagtcatgggagtgctataaattatttgtttctggagggtcagcagcgtattttgctaggcttttattgattttatggtgtatgaagtaaagatatgtgagcttgacgaacaccggaacaaaaatccagggtctacttcacttttgttctatttttaaattttttttttccgttattgcgttttgtgacttcctatagagaatggacaagtgtcaacctatgggaggaatctagggccatgccttctttatctttggccctctctcttattctcttttaaaacatttttagctttttattttgaaacaattataagttcacaagaagtttcaaagatatgtacatggaggccttatgtacccttcaaccagcctctcccaatggtaaaatcttcagtacactaccacattacactatcaaaactagaacattgacagtgatgcaatccagagctttttaagattcaacacttttcttttggctgttctaggcactttacatttccatatgactattataattatcttgtcaatttctattaaaaatcctttttagaattttgattagaattgagttgaacttacagatgaatttggaataactgccactttacaatattgaatcttccaaccgaaaatcaaagtatacatctggatttttgatgtcattaacttatcattgcaatttttttgtagttttaagtgtacaagtcatttacatctttggtcagatttatccctaagactttaatatttttagtgatattttaaattgcactgttcttagtttcaactttcatttgttgaaattaacttccagtccaccctaggactaccattagctgaaacactgcctcttctaatatataaacatacaattgatttgtgtattgatctcttactctgcaatcttgctaacctcaattattgtagaagcttttttatagattgacttttctacatatactttcatgtagtctttgacaaaagacacttttacttctccccttccaaactcaatgcatttttctttttgcactggacacaatctccagtacaaagtataactatgcccatactggtgcacatgtgggtcttagattgtagcatcctgcatgtaaacactgagaacaacttccagcacttgaatatccactccttcccccacccacatactgggagaattcatgttgggagactacatttactatgaacatacacccctcatttgaaacaagactaggatacacagtaaagaatgtttattcactaaaattttgacagactgaaggccattattgcagattggaaataggaaatttaaaagaactacacggacattgagtaaaataacatgggttgaaatttgcctggcagtagcctaaaagtaaatggtcttcaaggtgcatatgaaggaactgtaggagggaaatgggataattaattattaattattaaatgtaactagtaattaataactaataattaaatgtagccacactagcttggagggatttgaggtgagacatctaagatactaagtcatggtgagggctggaagacaaaagaatgaatcacttcataggaatgactgcggggaagggcttgaaggaatcatcctctcgcttccatgtgaaccgtgaacattaaacatggagaaatgaggagtggtggcagatcagtttgggatgcatcttcaggggatgctgaaacaacaacagcatttggtttcctctacatccctgtcacccctcccccacaagcccagggagtggtcagcagtggtgctttgtgatgtcaaagccaccttaggaccgccattggctgggacactgcctgtatgatcaaacaaagctcaagggtgtggctttgccttgtcaccaggagggtatatatagggagggcaagagctctgggacatcccactgggaagcttcaacatagctgtggaagtctgcagtctacaggagcctactatagacattctacaaccaaccagaatcatggaacagccaacttccagcaccaatggggagaagacgaagagcccctgtgaatccaataacaaaaaaaatgatgaggtaagattgtcaggttttgaagggaaggtgagggtgaa

SEQ ID NO: 44615 - DNA, 2300 bp, Homo sapien
gcccggtgaacatttgtgtgaatataacctgacggaagtcccataaaatgacaaaaaatgaaaaacaatgaaacatgtatatgaatgactactatagatgatacagaaggtagaccattattcacaaataatgtaataaatcctttgcccatcagatgtttctacctagatttggggcctttaaacatcaaccaattatggtaaatgtttaactgtaggagttcaggcagacagccaaattctggtttcaaagctgttgctagttttagcttaaagatttttttttttcatttttaagcaagaacatttctggataccggttgtgctctattgtggctagagccgctgggatttgaataagtaaattgggcaacacactggtcctgaagaaatgggcctggcagtattacctgaatgtggcaaataataggctaccaagagtcctagggaaatacttcccatttataacttagctctacttacctaaagctagtttattcccacagacacgaagagagagagagttgtttttcttagccaagctcctacaaaaaacagcaaggttgggggatgggagcacatccaatgtttatgccttttgtttaggaaagccaggtatctgaaatacatacatgatagccaactcctctctgctcccctcccccaggtttatttattttcttaacaagcttattaacgaaattatcaatttgcatgaaactggtttgaacattggcccttcctcagaatatttcttatctcttgtggaagcactaacaaaaagggtagaagaaggggcctagacaatccacacgttggatttgcagccactggatatttcagattcagctgctaaagcctctttggtatacacaatgaggggcgactgaagtgacttttcttagtccatttcctctccttctccccgtctcccgaaggtactccgtgggtcccttccctttctctcttcacagtccctcctgagcagtcccaaagcttcaaaccttgttctccaaccccctttccctaatgtctcccaactaccacccccttccccagtcaaactcccctcccggtcaccaccaaagcccggagaagtggaatgcacacaatgcctcccttatagggcttgagctgggaactgggcatgctcagtagccaaagtagatttttttttttttttttttttttttcttttggtctcaagtgcggcatctctcccagtcccacgcctctctttcctcaacccctatcccctatcccctatccccacccccagctccaagatcatccggcttaacccattctgcaccaaaggcccacggagttctaaggtgcggataattaacccgtctccttctaacccggctaaatagtctcactttaggctaaagcctcacactttcgccttaaagcccctggccccttacgcgcagacaggtagggggagtgcgaatactactggatcctaggaaattggttcccaagaaggctccttccaggatcgaccgctacggagaagtattccaggagccctccgttctgcggggtgacaattagccaaaggtaccgtacccgtgatacaaaatccaagtatgattgttgcatttgaatgtcattgttgttgactcattcccctccatcctgtaattattcaattccgcgtagactcgacgaccctatcgatctccctcggcccccctcccccaggctctccagtgtttctttggcttttcctggcttcttggttgctctctcaaaggaatgccccgtgtgtgtgtgtgtgtgtgtgtgtgtgtgtgtgtgtgtgtgtgtgtgtgtgttccttcgttattaggggactggaagagaagaaaagggctcgagtgtgtgtgtatgtggtgggggggatggaggcgagtgcgcccttgttagaggactggggtctccacgcctgaggaaaggggtcgctcctccctagggaatgttttaggcaaaaagagggggcggatgccgggaggaaagcgcgctgtctttctgggtgtgtgggtagaagaggaatcaaatgggcatgtctggatgggggacgggggtaggagctcaggaatgtgagggggtcaaagtggtcgagtgtcgggaggaaggactgcttgtgtgcggggtgggggggggtggtggagagcgggggcggggattcagcgcgtgtatgtaaaggtgcagcccgtgtgctaggcgctgggtgcgcgcgcggtgtctgctcgggtgcgcgcgcgcgccgctgcccgcctgcccgccggcccgcctgctcgcctgctggggct

SEQ ID NO: 44616 - DNA, 2300 bp, Homo sapien
ctcattctattgactcttgttaacatttgtagtaaaagacaaacatttcacctatctggataaaatatattcagcttcctgaattgttagcatttagaataaatgccaacttgttttgatacccattactactttcaaactgcattacacaataaaatgcaaatgtgagttattaattagcaggatctgttttgtccaagtgtgcaagagtagagggatttttcaacattctgcagctgttacctatgaaggaaacatcattcactttgctaaaaggagctgcacaattacatacgctgttatagacaaatattttagtgtttccttaatgctatttcataatggatttcacattgaataagataaattttaccaatgctgcccaatttctgtctctaggttgtttgtaaaagagaggatgattacagttttcaaggcaatgtggagtgaaggtagagaaagagttcttcatgaacgacacaatatttagcaaggtcataaagaaatatgcccatacacgcatatctatttaagtattcatttacatattgtacgtgcatctctgtatacatgttgtgcccggtgaacatttgtgtgaatataacctgacggaagtcccataaaatgacaaaaaatgaaaaacaatgaaacatgtatatgaatgactactatagatgatacagaaggtagaccattattcacaaataatgtaataaatcctttgcccatcagatgtttctacctagatttggggcctttaaacatcaaccaattatggtaaatgtttaactgtaggagttcaggcagacagccaaattctggtttcaaagctgttgctagttttagcttaaagatttttttttttcatttttaagcaagaacatttctggataccggttgtgctctattgtggctagagccgctgggatttgaataagtaaattgggcaacacactggtcctgaagaaatgggcctggcagtattacctgaatgtggcaaataataggctaccaagagtcctagggaaatacttcccatttataacttagctctacttacctaaagctagtttattcccacagacacgaagagagagagagttgtttttcttagccaagctcctacaaaaaacagcaaggttgggggatgggagcacatccaatgtttatgccttttgtttaggaaagccaggtatctgaaatacatacatgatagccaactcctctctgctcccctcccccaggtttatttattttcttaacaagcttattaacgaaattatcaatttgcatgaaactggtttgaacattggcccttcctcagaatatttcttatctcttgtggaagcactaacaaaaagggtagaagaaggggcctagacaatccacacgttggatttgcagccactggatatttcagattcagctgctaaagcctctttggtatacacaatgaggggcgactgaagtgacttttcttagtccatttcctctccttctccccgtctcccgaaggtactccgtgggtcccttccctttctctcttcacagtccctcctgagcagtcccaaagcttcaaaccttgttctccaaccccctttccctaatgtctcccaactaccacccccttccccagtcaaactcccctcccggtcaccaccaaagcccggagaagtggaatgcacacaatgcctcccttatagggcttgagctgggaactgggcatgctcagtagccaaagtagatttttttttttttttttttttttttcttttggtctcaagtgcggcatctctcccagtcccacgcctctctttcctcaacccctatcccctatcccctatccccacccccagctccaagatcatccggcttaacccattctgcaccaaaggcccacggagttctaaggtgcggataattaacccgtctccttctaacccggctaaatagtctcactttaggctaaagcctcacactttcgccttaaagcccctggccccttacgcgcagacaggtagggggagtgcgaatactactggatcctaggaaattggttcccaagaaggctccttccaggatcgaccgctacggagaagtattccaggagccctccgttctgcggggtgacaattagccaaaggtaccgtacccgtgatacaaaatccaagtatgattgttgcatttgaatgtcattgttgttgactcattcccctccatcctgtaattattcaattccgcgtagactcgacgaccctatcgatctccctcggcccccctcccccaggctctccagtgtt

SEQ ID NO: 44617 - DNA, 2300 bp, Homo sapien
cagggccctggtggcataggcacccgagggaatttcctggtctgcagattgcaaagaccatgtgaaaagcatagtatctgagccagagtgcactgttcctcacagcacagtccctcacagcttccattggctaggggtgggagttccctgaccgcttgtacttcccagctgaggtgacaccccaccctcctttggcttgccctctgtagcctgcacccactgcctaaccagtctcaatgagatgagccaggtacctcacttggaaatgcagaaatcacctgccttctgcattgatctcgctgggagctgcagaccggagctgttcctatttggccatcttgccagccactccctttaattgtttattattcatttgggttgaaaatataattactgaagttttcaataggagttattctataaagtacgttgtaatctttcaatagaaatatgcactaaatgttttcttaacatttggattaattttccttggatagtgatatacccattgaaacatttttggtaaacaaatttagaaaacaattttaaaaggtagtaagacgattgaaagctgttattttcaaaaattgtaatcagtttctgacttactgtgtttgatgtggcatatgccttttggttttctgtttgttttgttttccataacatgatatgacagggtgttattctcactgttgattgcaggcaagagtacaaaaaattattagaagttagcttgtgagcatttaataaatggaattgttgaactatagacaatgtctggggttcactaaaaatgtataccttaataagaatcttcttttgatttgttaatgtttagatgacagtcatgagaatgcaataaatgccttgtgtctggaggtcagcggggtatctttctaggcctttcttgtttttatggtgtataaaataaagttatgtgagcttgatgaacactggaacaaaattccagggtctacttctcgtttgtcttatttttagatttttttttttcattatcaggttttgtgacttcttatagagaatgagacaagtgtcagtcaacctgtgggagaaatcctgggccatgccttctctattttcggtcctctttcttactgtcttttaaaatatttttagatttttattttgaaacaattataaattcacaagaagtttcaaagatacgtacatggaggccttttgtacccttcaaccagtctctcccaatagtaaaatcttcaatacactaccacattacactatcaaaactagaacattgacagtgatgcaatccagagctttttaagattcaacacttttcttttgactattctaggcactttatatttccataggaatattataattatcttgtcaatttctattaaaaaggctttttagaattttgattagaatttagttgaatccacagatgaaattggaaataactgccattttacaatattgaatcttccaaccgaaaatcaaagtatagatctcaatttttttcttatgtcattaatttatcattgtaaatttttgtagttttaagtgtacaagtcatttacatctttggtcagatttatccctaagcctttaatatttttagtgatattttaaattgcactgttcttagtttcaactttcagttgttgaaattaacttccagtccaccctaggactaccattggctaaaacattgtctcttctaatatagaaacttctcatatgtaactgctaatatataaacatacaattgatttgtgtgttgatctcttactttgcaattttgctaacctcaattaatgtagaaccatttttttagattgacttttctacatatactctcaggtagtctttgacaaaagatacttttacttctccctttccaatctgaatgcatttttttttcttttacactggacacaatctccagtacaaagtataactgtgcccatactggtgcacatgtgggtcttagattgtagcatcctgcaggtaaatactcagaacaacttccagcacttgaatatccactccttcccccacccacatactggcagaattcatgttgggatactacatttactatgaacatagacccctgatttgaaacaagactaagatacatggtaaagaaagtttattcaccaaagttttgacagactgaaggccattatttcagattggaaataggaaacttaaaggaactacatggacattgggtaaaagaacatgggttgaaatttgcctggcagtagcctaaaagtaaatggtcttcaaggtgcatgtgaaggaac

SEQ ID NO: 44618 - DNA, 2300 bp, Homo sapien
tggtttagacagtgttatgggttgaattgtgtctactaaaattcatatgttgaagttttaactcctggtacctcaaaatatgtctttatttaggcatacattctttacagcagtgattcccaacatttttgacaccagggaccggttttgtgagagacaacattttcacggacatgtgggaaaatggtttcaggatgaaactgttccacctcagatcatcaagcattagttagagtctcataaagagaacacagtctagattcctcgcatgtgcagttcacaatagatttcatgctcctgtgagaatctaatgccactggtaagctcactcaccaaacactcacctcctgctctgcggcctagtttctaacaggccacgaaccggtctggtccatggcctggaggttggaaacctctgctttacagagttaatcatgttaaatgagatccaatgtgatgggtgtccttatagaaaatggaaatttggggccgggcgcagtgtctcacgcctgtaatccctgcacttggggaggctgaggtgggcagatcacctgaggtcaggagttcgagatcagcctgactaacatgatgaaaccctgtgtctagtaaaaatacaaaaattagctgagtgtggtcgtgggcacctataatcccagctactcgggaggctgaggcaggagaatctcttgaacctgggaggcggaggttgcagtgagccgagatcgtgccactgcactccagcctgggtgacacagtgagactgtctcaaaaaaatatataaaaataaaaaaaattaaatttggccagagagaaatgcatagaaggaagatgatgtgaagacacaaggtgagaagacagacatttccaagccacggagagagacctgatatacatccttatctcaaagccaatttatagtcttgtgtgcacttgtacaaacacaatagatgaacagcatgggcatggctattattattaatttgtgagtaagtggtagggaggaggtccagggaagattgtctggaaataatgacatctacgctgcagatgtatggaggaacagacgttatcctggtgattgggatgcagtgtgggagaagggtatcccaggcagaggagataacttgtgtaatgtcaggggtgggtgagtaagagaggatggtatgctcgcaggactccttcctgctctgacctttgccctgacacttcatgttcctggttctccatcgcctctcctgagcatcattttctctcccactactcatgctaagcactgtgcaaagttcagttcctggcccagtgatattctccttttactacttttgaaaaattttaaaaatgccattacataaaatatcatccctcccaggacccccgcggtatgaaactccagctgagtggcagttcttgcctacagcatttacatttgcacagcccagcttcagctcaaccctgagatgccaaaatgacacccttcacctttccttccaaattgttgtctagattctgtattttaaaaaatattctcatcatcaataagtgacctggtcctaaaacctggagtgatctctgacttctcctgctaccaaacaccttgtcaggaatcagggccaaacagtgttattgtatacatcctcaattgtttatttttcttgaaattctaagcaaccttcgtctctccccattctgtgagcatctctctccagctccagtgaccagtggagattctgtgtcagggctccaaccccagatttccccttcacattgccctagtagaggttcttcatgagggatccaaccctgcagcatacttctgcctgaacatccaggcatttccatacatcttctgaaatctaggcagagcctcccaagcccaagcctcaactcttaccctcagtgcatctccaggcttaacaccatgtggaagccaccgaagcttgaagccaccaaggcttgaagcttgtaccctcatgttagtcttagattatagtatcctgcaggtaaatactcagaacaacttccagcacttgaatatccactccttcccccacccacatactggcagaattcatgttgggagactacatttactatgaacacacacccctgatttgaaacaagactaggatacatggtaaagaatgtttattcactaaagttttgacagactgaaggccattatttcagattggagataggaaacttaaaagaactacatggacattgggtaaaagaacatgggttgaaatttgcctggcagtagcccaaaagtaaatggtcttcgaggtgcatgtgaagga

SEQ ID NO: 44619 - DNA, 2300 bp, Homo sapien
aaagaaaagtctgctctttttaattttgtcttactatcagtgtggtcccatgtggaaaggcaggctgctaaatgcttttcgaaggctggtgaacaggttagacttgcttacaaggctaattaaaattgatgcatgccatctattacatgttactactggatctaaataaagtatcacttttcatcattaatgccatgttccttctctactctgtatagaagtttttgcttattttgtatgttccctttggctacagacacatcacccttcttagtaaactgtctgagtttttcagcatgactgtctcattatttctgtattggaatggcctcttagctctgtgttttgcagttgtttataacatctactaaaagcgacatgaaaagatgacacagtcagaaatacggtaaagacagaagtaacagtattaactgacctcatttagttaataatatgatgtgctcagtgcactgcttttagtctgtagcaaacagcacattggatgtttacactaatacagatattgtaaaaagaagagcaatgcttctggatatataaccgtacatacactgcccacgtgcttatgtgagaactatgttattccgaagttgcttatctgaatggtaggaagatttcaaaaaggctttctcaagaatgaaataaaaggaacagtaatgacccttacaactccgaagatacgattataattcttccgactattattaaagcaaactctgtacatcttcataatataagattgccagtagttttctttttaaaaagcccagcataatctccttagaaaaccattatgaaagaaagccaagaagagaggacaggagaagcacaaaagattcccacgggaaggacaagaaaaaggtggttgtcagtgctgtgagaacgagttgaaaggcatgggaaatatggaaacagacaaattccaatgcagatccactagctggagaggtaattttgcgtctaattttgcacctctctcctcgcctccccgtctgctctccaccatcacgcttttcgacagtaagaaggatttggggttttgcagactctagcgggcatgaaaaggatagggggtggcaacgacttgaattaatgacgttctcctacaggatggaggggaaaatgacttagtgtcatcaaatgaactccctactcctggcataaatttatcaaactgcaactttatctcgaatactctggaagagtagaggagaggccctagagaaagcaagtcttgaggggaaacgcaatgctcttggcaaaaaccgcacctccctcttgaactacactgactcttttcacagagcgccttcctttaatagaatcacaaccacctggactactaataagaggaagaagaaaggagaaaagggaagggaggatggcaaaaatcacgctctagaagatccaggcaacgtcgtcgtgaagaataaagggaatcaaaatgggcactggaacgctgctaagggcttgctttgttaacacacttgcacaactcaagttcagctctatcttatgttgaaagtccttgtttacgatcctcgtaggaggttcttaaatatctgcctgcgaactcccaaagactgggcgcttactagttaggggaggcagctgtcccggagggtgtccagctcggatggctgactgctctttcacttgtcgttaacttccacccagtagtcttagtctccccttggacatggtaccgaccgtgtgccattcttatttcacttgaccgagcccgagctgcagcccagggtggaagccgcaagggctgggcagagttccaggcaagagggaccgagaggcgtgagcagtgctccgcagcgcttgtcagagaaatggagcagcggctcctttgtgggctcttacatccccgtcctgggtgcacagcccggatatttgatctgtggggtgattgataagtgagggagaggggggacgcgatccctccctccctcctccctccctcctccctcctcactccctcctccctcctccctccctcctccctcctccctcccttcttcccctctcctccctcccgctttacttccctcctccctctcgcctccctccctccttcctgcaagaagcgttgcccgttggctagctgctcggtggggatctgcctgccctgggggcgccgcccgcgctccccgcggtgctctcgctcctgggctgcgccagtccgaggcggtgccggctcctttgcctccccgagtcgcagatgctgcgggcgcctccgggaaaagatctgggcggcgcgctcgctcggtaag

SEQ ID NO: 44620 - DNA, 2300 bp, Homo sapien
gtgggaagaggagattatagtgactgaagaaagaataggcaaacttttcaaatgaaaatggatatttagtgtattttgtagaagatctccaaagatcttttgtgactacaacttcttttgtaaataatgatatatggtatttccatcgtcagttaccgagtatagccactgggtatcactactttgtgttaaagtgccttcgcactttaagtacattacttaaatgttgcttttagctttgataaattgaaaatattttaatgtgttgtatttttgaaattgaaaacactgtaaaatagattgatgtgtcagctatattaagtcaacgtacagtttgcttgagttatagaaaccagcctgtcatcaaatgattctagttctaggactttgtaggcttaactataaaatatttcctttcctctgggtttaagtgattttatttaagtcaactaaggggatttaacagtggactagaggtaataagccacctcagtcaggattaataattcattaataaaatatatttaacccaatatcagagtgaattgagcaattaatgcccttccataaatcattattttacactaacatggtgagtgttttagattattttcctaattaaaagaacgtgacacagctagtaatatatttttctgcattgaattagatatttttatatatttaaatgaaaaagtctgtatttctaactttttaattgaaattaatattttttctgcctattgaaacattttctataaacacacaccagtagaggccgccacacacctcatttaacaaagacatatgagccattaaagacctcgaaggaagacttcatgggtgagattaaaacttcccaagtaagttctctgcaaaattcaaggtagcagagataaaaatgtatccattactctatttattttagatcacgggttagactcataatccttctcaagtttaacactttctgacaaaacagcattttcctcttgagtttaattgaagcattaatggggtgctatcaaatcaagtactatttgcgtctccaaatcgattaatagttacctaaaccaagacattaagcatctttttccttctgccttctttaggcttgtgttacttgaagttttccttgtcagcttgagcaagactttcattttggtgttagcattaaaatgattttaattagccaagtctatataacatttatgaagccttattagactgtaaataattttagatgcaaacgtgattgtgtgatttaaacaaacagcccttctttacaacaaaaaatagttttgttttgtctattgtaaatccttatgcaactgggatggtgatctgcatataaagtagttcagcttttcaattccttattaaagcaagcgatggcgtctgaaagaagcacactgtttccttttcataaataggttactgcacataataatcctttatcgtcatgtggagattgaagtggatactgataacttacttttaaagctttaaaattaccaatagtatattgtctgtcactataaacaattcatgtgataggctttcaattagaaattccttaaatccaaattatttggattaatgattactggtgtaaaatagttgtttgtaaaaacaatagaaggtaattgtgtgtatataataacgtaaagggcattgaagagaaacatatctttaacaacataaaatctctgaatatctacagtggcaagctaacatgctcattctttgattagaggtgataattcctatttcgatccattagaagaaagttgaaaatggtgggctgaaatgatcttcaagaaagttaatgtacagatattttacatttcacagaagaggaactagaatattatgctagttgaatgtggagaagactcctggaaaccacttcatctttgagtgaagtatttatatataaaagagtttcaaaaatccttttctgactgctctcatttgatgcaatgataaatacagaatacagaggtaggtattttgggaagtgattgtgaaggcaaatttgcatatatattctgttaagatcattttcaggcttaaattatatgactagaggctcttgatgcagtgattccacttcagtgttcatttttatttttctgaaagtaaagatactcctgtaaaatgccattgtccatagaaaaaatattaactcattaagtttaaagacagatgataccttaatattaacttacttacacgattttaaagacgcctactgagagaactcaaatttataaactctgttgcctaataattatggttta

SEQ ID NO: 44621 - DNA, 2300 bp, Homo sapien
ttttttaaaaggatatacccaagtctaaaggcaagaaagggaaatctccagcaacaaaaataaaactggacctcatagcaaaagggtgagcaggaatgatatgaacttggaagaagcctcaggcctgcgtgtggctaaggagctagaactgagatggctgaataaagtctatcaaataatgtctattattaaaagtagaaccaagtgggaaatgtacttccacaggaaatgtattcccagacacaaggcaaggaatcttccctgtcctgctctgccctactcccactcccaaatcagtttgggtgaaaacattaatgactgctataatgaaacacaaaaatgcaccaaccactgtatagcgaaaggacaaaggtaagaattagcacaagacttgaactggggaatcctgaagcagttaatacagaagtgcaccaagaggagtagacccactttatgggcatgagaggcctccccgggaaaaaaaataacaattctatgtttataaagaaaattgaactttaaggaagaagtaggataaaaaagcaaagaaatgtgttaaaacatattgctatatgtaaataaatattgacaataaataatagcaatgaaaaatttgaaaaagtaaataacaagataagatgttagatttacatggaacgaaaaatacaatttgagagtctggatttaatctttctgaaggcttaaggagtaagagacattgattagctttagagtttaagcacatatgtttaaaatgtgaagggtggccattaaaggaccagaaatagaaccctttcctgagtaaagggttctcagtaccatttgcttggtcttaactcttccttgccctgatctatgcatctagaggcttatctctaaggactgtatcaactgggctttctcatcctccaggttcttagtttggccacagctgtgttactctggtaaaggccacatctcctatggaatgagcccctcctacagcttttgcagttgtttcaccctataaatggctgcctcatcttgcctctcagacccgggggtagtaatagcttctttttgcctcttagagcctgtagaaagatgctcaggattatccatgatctcttgtttttgttaaccctgcccacatctttgcatgcagtctttttgttcaactcttttcaataacccctttgaagtgtgtcatctgtgcattgctctgtgtattggacccttaccaatacaaaggcataacttccaaatcaatgtggagcagaaaaaagtagagctggaaaaagtaaagacaactccaaatcttaggaatccatggaaaagggaaaaggaaaaggaacaagtatgctaaatagaaacattaaataacacagtggacgtgaaagaaaatgatatgagcaataggatataccatttatgtacatttttgaatgaacaaaacaatattatatattgattatagatgcatacatgcataaagaaattataaaagcatggaatggaattatatatgccaacttcaagctgatgcttcctccaaggaaggcttaaaaaggggatccaaaaagaaaacagttaaacatatctgaagtgctttattctttttctttttttcttttctttttttttttttttttgagactgagtctcactctgtcacccaggctggagtgcagtggcacgatctcagctcactgcaacctctgcctcctgggttcaagcaattctcctgcctcagcctcccaagtagctgggactacaagcacccaccaccacacccaactaatttttgtatttttagtagagatggggtttcaccatattggccaggctggtctcgaactcctgaccttgtgatcagcctgccttatcctcccaaagtgctggaattacaggcatgagccaatgcacacggcatgaaatattgtattctttaagaaaactatttgaagtaaatatgtaacatattaatacttttgcttattttgagtagtgtacatgaggggttataaaacttactgcaggccgggcgcggtggctcacgcctgtaatcccagcactttgggaggccgaggcgggcggatcacgaggtcaggagatcgagatcatcccggctaaaacggtgaaaccccgtctctactaaaaatacaaaaaattagccgggcgtagtggcgggcgcctgtagtcccagctacttgggaggctgaggcaggagaatggcgtgaacccgggaggcggagcttgcagtgagccgagatcccgccactgcactccagcctgggcgacagagcgagactccgtctcaa

SEQ ID NO: 44622 - DNA, 2300 bp, Homo sapien
cattaataaaagtgattttctctggtgacataataatttctttctgttttattttttgtgtatctgttgcatgtttttttttgttagaggttaccatgaggtttgcaaatactatcttataactcatgtaactcattattttaagccaataacaacttaacactgtttgcgtaataaaaaacacaagcaaaaagaaaaccaataaaaactctatgccttaactttatacctccacttttctaactttttggtgttctatttatatctgattgtactgtctatatcttgaaaagttgttatagttattattttagattggtgaatagtttaatctttccacttaggataagagtagtctagacaccatagttacagtgttattatatcctgtgtttttctgtgtacttaccagtgagttgtgtactttcagatgattacttatgaccactcattaacatcctattttttaattgaatttctccctttaacatttcttacaggacaggtctggtgttgatgaaatctctcagcttttgtttgtctgagaaagtctatatttgtctttcatatttgaaggattttttctgaagataaactaatctagggtaaaagttttactccttcaatattttaaatatgtcatgtcaatctctcctggcctgtgagttttccactgaaaaatctgctgctagacatattggagctccattgaatgttatttatttcttttttcttgctgcttttagaatcttttctttctcctttatctttggtagtttgattattaaatgacttgaggtaatcttttttggtttaaatccacttgatactctatagccttcttttacttgaatattgatatatttgtttaggtttgagaagtttccttccttcctccctccctcccccccattccttccttcctttctttctttctttcttctttcttttctttctttctttctctttctttccctccccctccctccctccctctctctctctctctctctttctttctttctttctttctttctttctttctttctttctttctttttctttccttctttctttctttctttctctttctttctttctttctttctttctttctttctttctttctttctttctttgatttgcccttttgaggctattttctcaatcctgtaagcatgcttcgttgttttttattcttttttaatctcctctgtatcttttcaaatagcctgtcttcaggctcactaattctttcttctgcttgatcaactctgctattaaaagacttggatgcattcttcactatgccaattttgtttttctgatccataatacctgcttgatcatttttttaattatttcaatctctttgaaaaatgtatctgatagaattctgagttcattctctgtgttatattatttttgagctatctcaaaacggatgttttgaatgctctgaaacatcacgtatttctttttccccaatgtgggtccctggtaccttagttagttcattggttgaggttattttcttctggaatgtcttgatacttgtagatggtcacctatgtcagggcattaaagagtttggcatgtatcatagtcatcactgactgtacttctttgtactcatgcttcttggaaaggctttccacatattcaaaaggacttggctgttgtgatctaagatgtgtcttctttagggagcaccccaaacccagtaacactgtggttcttgcagacttatatagctaccactttcatgattctcaacaagatccaggagaattcgctggattactaagcacagactttttttttgtttctattcccttttactgtctctcaaacaaacgaaatctctctctgttttgagccacctgaagctgggggtagagtgatcaaagcgcccttgtagccaccaccactatgactactgtttcaggacagtgtaggaaggacaactcaaacactcaagtgggagggagaggaaaactaaaactttattactataagcaaatatcacaacaaaaacaaccttataacaagagaagacaaaatgtaaccgattctcatcagactgcaggaagagtcatcaccagagtcgaaaggaagatgcctgggagcctgcagtcgaagttttaagcaaacgtcacagcaaaaacagccttaaaagaagagaagacaaaatgtaaccaaagcttaccagaccacaggagggtcatcaccggagtcagaaggcggacgcccgggatcctgcagtcggacttgggtcatgccccagcatacgacaacac

SEQ ID NO: 44623 - DNA, 2300 bp, Homo sapien
ttaatactttgaaatttaccaacttaatcattcatagttttactaatatagtttgaatgaatgccctgaattctctcatacaacatggaatttatccagatttgaggtgtatcttcagttctgtcaatgttgtattgtgtagagtgagggaaagagtctcataaattgttggtattaatgcaaattgctagagcttatatgggagaaatttggcaatattgataaatatttaaaaagccacctaccatatgagccatcaattccactgcttggcactgttcccactgatatagtcacatccatatacagagagattatatatggttattcaataaacattgtaataccaaagactcaaaataacctaagtgtcaatcaataggggaatggttcaaaaagcagactaagatattacaagtagctcatatcgatagctctatatgcacaaaaaagtggaataacctccaagtaatacttttcagatatatatatgtaatatatattagagagcaaaagcccaagtgagacagacatatgtcttgcatactaaaaaataacggggaaaaatatgagattgtttaagtggaagctcgcatgcccctacataatcaaatgtaatgccatcatgtaattatgacttataaaattttactaaagtatcttagataataccaattatttttcaagcaagatataatatgaattactggctctgggtgaaatagctgacatactcctagtttttgagggttaatcagactaaatagtttgaaatgtactaatttaattaatcatccatacttttactaatagtttgaaggaaatccctgaactctcatacaatatggaacttatccacatttaaagtgtatcttcagttctcccaatgaagggacctttttatttacaaaaagaagttgtttctaacatattcttcttacaagtgttacttttccataaatataggatagaggaaatgaaatgcacagcgacatatctacctttatacactgtagaaaacactatagaacgtttagaactagcaaaggaatagttctatctcatttgttatttttatagtctagtgattttgtggaatcactacatcatggtgtaaatgatgtataaaatgaaaaatgatcagtttcctttgcatggagaatatagaggatgctttgtaatttatttcctacctgtactgttggctacagtaaaagctattttctcactctcaagttgccttgatgcagtatttaatatccagttcgactaaagacccaagggactctgatgttaggaacttagtgtaaaaagcatagagatgccaatcttgccaccaatcactggtttaatttttaaacatgcaccattcagggtggaaaggtcaagaccagttgttttaagtgaaaagtgtacaatgtcacaccaattttagtatttagcaaattaacagatagtaatttttaaaaagcagaactattagtgttttgttacaaatgtatcaaaatatcacttcacccttagttttagatttggattccttgtgggcttgtagacatgcgtattcacactcaagcagagataacacttttggatggcaatgacacaatctcttagattacacactttttccaaaataatgtatctcccactgcccaactaaactcctagaccattatagatccttgtaaaatagaatacatgctcaacaaaatgctaaacctgtgcaaggaactacaatgaatatcgaacaaaccatgcttcttttacaaaatagttttctcacaaaatgtcaatgtaaacctagcaagaagctattgtgtaatatgtttctatgtatactcacatggagtattttcaattaatatgacttactcttaatttactacctcttgtaccaagttggcatacaatatatttttccaagataaattaccagtgagtggaaccaattgtcacatatgagtcccggagctgaggaaaagtagaatttaacaaggccactgtagaaaagattgctgcataactgttcaaaatcatttaagtataaaaagactttatgcttatgaaaaaaattgtcggaggaggagccaagatggccgaataggaacagctccggtctacagctcccagcgtgagcgacgcagaagacgggtgatttctgcatttccatctgaggtaccgggttcatctcactagagagtgccagacagtgggcgcaggccagtgtgtgtgcgcaccgtgcgcaagccgaagcagggcgaggcattgcctcacctgggaagcgcaaggggtcaggg

SEQ ID NO: 44624 - DNA, 2300 bp, Homo sapien
acagcaatgtgggtatagctcaaaaacagactgttgagtaaaacagtgggaaatagagatttacagtccaataccatctctgtaaatgcaagaggcataaacaaaacattatctgtgttaaattatcaaggatctctatcgaacatattgcagcttgtgtctagaagaatgagagtggggatcgagaaagatgaggaaaaaataatataaacactataaaataatgtaaacaaggaccctgtagggactgatatgacaatgtgctgaaaattgaggagcaaagttaactctctgtacctgagataaaataactagctaataggaatccagctgaaaaccttaaggtgcagggcctctatggggcccaggaaggatgtgtagagacatgaacggatgaaagtgcatcacaggttcagggaacaacacaggttgagtgtggcttgtagtaaaaatggttgtgaagagttgacatatttttaagccctgggtaaattgaacaacagcttacacttggaggggtataatcattctaatcaatgtgtccccttttactataatacattggagttgcagctaatgctctgctcccattcagcctatgatgagattctctttcagccctattgggttcttggcctcatgtgactactccaaagaccctagtccaaaaggtctttcctgtttgctatggccttgaggaatgtggccctagatccaccgctttaaagctggagttccaccagcagcaacatcctctcattctggggcacctgcctggggcaggtcatcctgcctctgccaactcagtgctattagttaactctcacctgccatattccagctggaatcatctccccttctccaccccagactaggtcatgttccgccatcatggaagcgcctattcttcataccccttatcacagctgcaactactcatttacttgtctgacaatttgatttatgtccacctactttgctaggtactaagttcaatgctggcagtcgtttcttctttttttttcttttctgttttgctcaccgatttctcgttagcacttagcacagtgtctggcacacgatagatgctccgtcaacttctcagttggataccagcatcccgaagggaacatggattaaggcagctataagcacggtgtaaaaacaggaataagaaaaagttgaggtttgtttcacagtggaatgtaaagggttgcaaggaggtgcatcggcccctgtggacaggacgcatgactgctacacacgtgttcaccccaccctctggcacagggtgcacatacagtaggggcagaaatgaacctcaagtgcttaacacaatttttaaaaaatatatagtcaagtgaaagtatgaaaatgagttgaggaaaggcgagtacgtgggtcaaagctgggtctgaggaaaggctcacattttgagatcccgactcaatccatgtcccttaaagggcacagggtgtctccacagggccgcccaaaatctggtgagagagggcgtagacgcctcaccttctgcctctacgggtcacaaaagcctgggtcaccctggttgccactgttcctagttcaaagtcttcttctgtctaatccttcacccctattctcgccttccactccacctcccgctcagtcagactgcgctactttgaaccggaccaaaccaaaccaaaccaaaccaaaccaaaccagaccagacaccccctcccgcggaatcccagagaggccgaactgggataaccggatgcatttgatttcccacgccactgagtgcacctctgcagaaatgggcgttctggccctcgcgaggcagtgcgacctgtcaccgcccttcagccttcccgccctccaccaagcccgcgcacgcccggcccgcgcgtctgtctttcgacccggcaccccggccggttcccagcagcgcgcatgcgcgcgctcccaggccacttgaagagagagggcggggccgaggggctgagcccgcggggggagggaacagcgttgatcacgtgacgtggtttcagtgtttacacccgcagcgggccgggggttcggcctcagtcaggcgctcagctccgtttcggtttcacttccggtggagggccgcctctgagcgggcggcgggccgacggcgagcgcgggcggcggcggtgacggaggcgccgctgccagggggcgtgcggcagcgcggcggcggcggcggcggcggcggcggcggaggcggcggcggcggcggcggcggcggcggctgggcctcgagcgcccgcagcccacctctcgggggcggg

SEQ ID NO: 44625 - DNA, 2300 bp, Homo sapien
gtgaggtggcaaagagctgagttcccaattgcgtgctccagcttgatctgagacctcagggtggctgtgcggtgtctggtcatatgataattttccacctgtgctatgacatgaacaaggctgctgttgggagacaattttccatggatttgttgagtttctgtatgtctcaggagagcttttgtcctttgtctctgactcagtagtcttgcatcttctgccagcatctataaaactgcaactagttaccttgttacttgaaagaagagtaaaatctcagatacttcacagctcctcacagttgaaagcagtagtttcagaagctattaataaatgttttgtgtgataagaatcctctcatcaaattcgttttggaaaagctgaagccaaaaaaagaatttaaaaaaatatagaaggaaagtgggttcttttcctgttagactctttgataaactaaacagcattataaatggctcttgggcatggggcagggatgggtggagtgtgctacgtttcaagaattattggaataggaagccttgcttctcccttcctctgtgggatgcttaggaacactggaaataagaatagaataaaagtagtagaaacggaaagtacgtataatataattatgaataaggatggaaatgcagttggggtggttttcatatcctttgtaaactagaatgtggtaagctaacagttatggaagcagtacctacacagtccttttgctggtgtgcccaaaccaaggaagataatgggattttgcccaagggtcagattttagagccaaaagggggtctagaaacaatgtccaacccttccattttacacatgaggcaccaaggcctagtgggaggaaggcatttacttagagccacccagttcatgggtggtaattttagcagtaaaacgtaaatgattttagtcacttttcagtgttcgtcacacattatttgttctcatgttatcgtattgttttatttatttgtaactcagttttaaggtttcataaggcaaatagcattttgtctaacacgtaaagcttctactaaagtgtaacaatctattgaatatctacgatattcactagtcactcttcaaatccaatactgcccaaaacgactttttgccatgatgaaaatgctccagccagacacggtgactcacacctgtaatcccagcactttgggaggccgaggtgggcacatcaccagaggtcaggggttcgagaccagcctggccaacatggtgaaaccttatctctactaaaaatacaaaaactggccaggcgtggtggtgtgcgcctgtaatcccagctattccagaagctgaggcaggagaatggcgtgaacctgggaggcggagcttgcagtgagccgagatcgcgccactgcactccagcctgggagacagcaagacaccgtctcaaaaaaaaaaaaaaaaaaaaaaaaaagaaacaaagaaaaaaaaaatccatattgccagtgtccaggatggcagccataagccacatgcgactattgagcacttgttaatgtggctactgtgattgaggaactgttttcttaatttcatttaattttaagtaattgaaatttgcatttaaatagccacatttggctagcagctgctgtcgtgagtgctgtaatgacgaactgtagtgaccatacactacagtgtgcactctgggaatgaggaggaattaacggctaaggttggagtcagaatccgagttattcctttttgttgatctatggcaagcagtcatgccactggtgcaggcctgaagccccgttcacttgttccacaagcatttagcaagcacctatatgccaggctttgagtgggagtgtgggggtgcaccaaccactggccacgtggttataagggtctgggcctgtggaatgaagcagaagacgtcatcgtgaaggaatcagtttcaggtctcgcgagagttggcacatgccacgcgagggccactgccctattggcttctgagtcacggactgccccggaagcttctgggccacggactgccccggaagcttctgggccacggactgccccggaagcttctgggccacggactgccccggaagcttctgggccacggactgccggaccgttgggctgtgaggcagcgtctcagcgaggcggcacccggagccatgtcttcacataggaggaaagcgaaggggaggaataggagaagtcaccgtgccatgcgtgtggctcacttagagctggcaacttatgagttggcggcaactgagtcgaatcccgagagcagccat

SEQ ID NO: 44626 - DNA, 2300 bp, Homo sapien
tatttttttttctatctttccccattaaatacaattttgtgagaaaagtaaaccagaaataaagtgaccataatcaccatttaaatgttaattgtaggtgttctggctttcctctaaggattttcaagcagatcaagtactaatgctggcaaccatcatcagcaatcaaatccaatttgaggattttttactgaaggcataaaggtcgggggccacagatctgagcgaggccgtccttgttgctttaagggctctcagtccagggctgaatactagaattccatgaataaataagtcacagagataatttgaaaatccccagcaccatttttgccaataactgtttctccatagagtctttttgaccagaggagtttacaggtagccaaatctacaagccactttgagatgtcgtctccccttggctgcccactggttgattttccatcagtcaaccagcatctgttgaggacttggtcccatgcaaagtaaatagacatctaagcaaagtcccagtggatgcttgagttgcagaatcttagagccttgtttctctatgttaatgatgtgctttctttccccccgtaaaacaatgtgaaagagaccagaccctgggccccttgtagctcaaatgctgaagtcattcatgcttggagctgaggcaccttctactggctccagccctggaagagcttcccaggttctaggttctaatctgggatccccctctaggggaaatatcagatcttgagcattttaatgtcttagggtctctgtttcttcaggaaaaaaatgaagttaaaaggtatttggatgattttggtaatatgagataatactgtagaagcatattcaaatagaagggagaatgtcagagaagtatgagccagagggctgctgggtgttttatggagaaactgaggcccagataagtgacttgcttggagtcacacacagagctaccggcaccctgctctgtcagggctcagtctgctgtccttcccaagagagttctagccttaggatttgaaaaatgtgccaatactattccctctgtataacgacacgaagaaggcaaattacatgcctaggactccagaatgctcatgtcctgaaatgccagaaagcggtcccgccccttcccacagacctttctctgcacggaggccagggaacctttccctccagggaattggctaaagggatccactccttcctggatcagaggtggaggttgaagggagtaggaggctcggttaaaccctccacgtgcagaaagagaatttcaggccagaagggagacgggcagccggtgcgtgggatactgggcacacacccagtggttttcccatttctcagaggaggagctagcagaagtcttttgctcaaggcacctggtgaccgtgcgaggaaagtgacagtggaacccagtttaacagtatcctaaccccgaactcaaggaccacgcaagggcagtcatttgttcctatccttgctgcccactgaatccagggcctatagctcgctgacctactaggtgcgcgcctaaaggcatgcctggagggcctgggtgcgggcacgtggagccacggggctggtgaaggtgaccgccttctccttcctggacccgcgtgctacgcactacagacctgagggatgctcaggcccgcaaagtttgctccactactcgggggctcaaggagctgtgcttgaggtggcagggggcgaccttcaaccccacggctgtttgtgctgtcttttctagttcaaaactaattcccagtggtgggggtgggctgggcttcagagaggggtcccattcccgaagcccgcgtcctggtcccgccagcccacctcctgtatccctgccacggcccctgcgtcccgggtccgggtccgggtcctcagctctgtggccgctcccactagctgattttgacagtggggggtgggagagggttcccgaaaggcaggggcgggcgcggcgagcccctgccagatccggggatgataacgtgcctgctccatgtcgcggcttctagctgtccaggctccgccccctgtgagtgtgtaagtgtgtgatgctgccgcggccgccgccgccgcctgtgcagccgctgccgccgccgccgccgccgccgccgccgccgccgccgccgccgccgctgccgccccggctgccgcgccgcgccgctgcctctgccccggccgcccccgccgccgctgccgccgccggcccgcagccagccaggcgggcggcccagcccgcctgagcccgcagcggctgccgccgcagcgtc

SEQ ID NO: 44627 - DNA, 2300 bp, Homo sapien
cccctgacacccgccccagtcagtaagccccggggcctgaggggcatccccactgctcgacctctccactctctcggggaggacgaggcagccttgacccacgagggctgatgaatgggtaggttatcggcaggctcctaggccaccagcttagaggtcacattgtcccttttagattcagtgtggcgggaatctaaaaggtcaaggatcgagaagcctgcaggatggcaacgtgagggaacctggcagtgcgacctcaggaatccactcccggaactctgactggggtgcctgtggaggctctgaaggtacagcagccaggcgctctgtggcattctgaatactggcacgcagccttcggcctctgccagcttttgtgagctgccctgcaccaggcagagggggcccccaggcctggcacagggtctgacacatggcaaatgctacagaaatagctgtggaccgcctgactgcaagatcgtattgaacatctggtgccgggcctcagcctgtgctgctgcagccaggagcaaatacggggaagtctggctaaggagaacgcgtgcctgtgtgggccccaaggatccatctccagatcaggaggaacaagcccgatgaccttgacaggcagctcaggaggtttctggctcctgccccagaggcccaagatgaggacgtggcaacatagggaggcccagggaatgatgagctcagggagaggtggccagaccacctgagacacctgttaaagtgcactttcccatgcccagaactgcgagctcctgagaccagttgcagaaaccagcatgttttactggctcccaggcggttctgatggaggatgtcccaggaggggactctgagatgggctatttgtaatctacggcaactgcctcacaacagagtgtgttcgtggagaagaggaaactgggcaccgagggctcagaagcagatggcagataatcaggaatatgtgaaaaattatggcacctccatatataataaaatattacagacatttctaagggaaaaggtaggcttctgagaaatgacacagagattgcctatgacattaagtgtacaaaaccagggaacgttaacagtacacacagaacaagcaatcacatcttgtgacatacatgttacaaacatacacatgtataacatatatccctgtgtgcatatgtgcacaactgatggctggcagatggatccctaatccattgtcatctgttagccctgagcaggtgggagaaaagggcaggatgttctggccctgaattacatgctctgtatccttttttcttttcatgataagcacatgttatgatttactattatcctatttcatatttgatgatatgaaaattattttcctttctctaagtataacagtattatggttatacttcaaaagaggcaatatttttcagagacagtgatcggaaaatggaaccatctgggatttgctttgaaacaattcagagatgggggagtgggtgaggatgagaggaacaagactatgtgagtgggaaacggggggagctgctgttttattccctgctcttggaatgttgaagaatttaaaaaatgcttttaaaaagatagtttcatttttggaaaagtaggaaacagccttagggggagataaagacttgaaaagcccaggctctcggcagagaagacagcggggataggggtgggagggctggagccaggcgtgaagagcttgctgggctctgccaggattgttctggatcctctccacccaaactaaaagtcctccaaccctccaggttaaaaatgggggttacaagagctctgccacacaaatggagggttcctgctgcattcatcaagaaaaaaaaaaaagttgctacaagaccctcccccacccacccacacctatccgtcaagcatctaagacagaggtctcaggactaacaagctgatcataaaaatgccccaggatcccactttgtttgtgaaccactggttcacaaaagagaacacacccatgtttatgtcaatggcaattttgcaaagcatgtttcacaggaaagttcagatgttttgactcaccagggaatttcaaaatgcttaccatgatccgaggtaaatgcaatgatggtgctgttggccagctgaagatcgtccaaagcactcaagaggcggccgacctgtgtatccaaatatgacacagaggcaaagtagctctggcggattttccgctgcaaattgaaaaaaaataaaaatgagagtgactgcaatttaaattgccaaggcatacagagataatg

SEQ ID NO: 44628 - DNA, 2300 bp, Homo sapien
atgcttccttgcctcttcctagcttcttgtggtttgctggcaatcattggcatccactggcttgtagatgcatcacttcaatccattgtcttcacatggatgtcttctctctatgtgtttgtgtctgtgtccaaatttttccttttgataaggaccccagtcatattggattagggcccaacccaattacctccttttaacttgattaccctgttaaagaccctgtttccaaataagatcacattctgaggtactgggtgttaggactccaacatacaatttttggggggaggacactaacacctaagtcaaaaaggaccaaaagacataccatacaaagcaaaggccctctgccctgcaccttccctcttctgttctcattttaaatgtttctactttcatttcttctagtagattgtccctgtctttctaaatactatgctatttctatatcaactttctaatgttttcaactttagacattgctgacttcttcctatgatagatgagatcacttatccattcctctttttatgtacatatttttaaccttggattttggaaattgatcaaacctatacaagattacagaaaatagtataataaaccccaggtgttcatcaatgaacttcattggttatcaactcatgacaaattttgtttcatctctccctgccattttcccttctccttttactatatagatttattgccatttttaagttttctattgtttacttttgtatctttaagtaatatccctaaatctgtatttctctttctatgaactggggatagcgactattgatttattattattattattattatttttttgcgataggctggggcaaaggagacaatcctaaaatgctaaccctaaattaatgtgcctacatttcctgccatctcccttcctcctcccagctttttgtcaactgttgctgcaggccaggttcccaaggaagctgactaagatgtagagtaatgtgcaggaagtttcttagggagtactcttaggatcaacacctgtagaaggggaggggagggaagaaatcaaaattcaacagacagagaaagtgggcagtctcaaaaaaggcttcagttaaccccacagggagctctgaagctgaaatggcctttcagagatgtcccaagttggggtaaggggctgcacctttgtaccttcaagttgaatcactgatgtgggcttcctgagaacaggggtgaccttggctgaggtacctatctttttctaagacaatttctgatgagggctaacgacagctaacagctctcaagccagctagggaaataaaatttttggtgttgaagggagatctgagcagtgcaccacagcaccatcacagctgtatttgtaccttcccattgtccattgttgtttagtcataattaagtcatctgggctttgttatagattgattctcaaagttgaaaatcaaactgtgtttgcagtattaggacggtataatagtattcagtacagtacagtgtagggctaggattccatctccccacaattgctgctctctctgtttggcgcacccttcttgcagacctcaatgcggcttgctccctcacttgcttcaaaattttgttcaaatgccacttcactagtgaggccctgcctggccaccccatagaaaataacaagcatgccccgcacccacgctttatttttctccagaccgggtatgcccaccgacactctctatatttttttattgttttaagctccaccaaagcagggacatagagccccagtgccaccaacagcgcctggtatacatatttgcgatacttaataagaattagttgaagaaatgaataggaaagggagtccctttagatggaggaagggactttctcaaaaggcctcatggaaggagaatggcattgaggctggcttacaagaagtgtgtcttttataaaaagaaggaagggcagggcttccaggtgaaaggcatagcacaagcaaaggcaaaaagacgggtaactgctagttgttaagggcagtggctgaatcgctatacccctagcagttctacacctaggggcctgcgggccgctgggtctgcgaagcttgcaaggcaactggcccgcccccgctctgcgcctgtctctcggccacgcctattgctgcaggatgacgcgcacctctagaacccgccccggaggggaggggacgcagggaagagtcgcacggacgcactcgcgctgcggccagcgcccgggcctgcgggcccgggcggcggctgtgttgcgcagtcttcatgggt

SEQ ID NO: 44629 - DNA, 2300 bp, Homo sapien
cctcaggtcacaaggtccccgtctgatctgccttcactccacctttcagagtcttatgtttgttttgtgtatattatcaaggggttttaggtcacttagtcggaagaatagggaaaagtatgtctactccagcttaatggaagtggaattctcctgagaacctttttttgatacaaaatatgtacttgtgcatattttgtatcaaaatatataatgtacatgtcccttttgtacatgtatataaattgtatataaatatttagggttataaaaataaccaaagacaccaaaaactgccacaggtggatttgagaagatgtggaaatgcctcactgctaagacatgctcattcttgacaggctgggaaccctgaatgctgtagtgtcaccactgccctgtcctgtacctacctatcttttcactcatttcctccaagctcaggttttcagtttggggtatgtgccacctaacagtgagctgtggaactgcagcacaatcatcaaattcaaaaaaggcaaggacatcttgctcagtttttaagatacgccatagatggagtaaaccataacctttgattccagatccttaaccctgattaaaaacaacacaacccttcatgttgatttaaaacatcccttgcaaaagatggtttgaatattccaagttggaaatacccagtcttttaaagttacagcaccctttttgatacaaaaaatgtgcatgacagaaattgtacagtgagtagtgttataaaaataaccaaacacaccaaaagctgccacgggtaaatttgagaaagtgttgaaatgtaccgcacagcatgagaccttgctggctccgtctaatagatgacgctggggctgcaaatgatgtcccagccttccagggcctgtggtctccagaacagggctgaaacctgttctgagttgacagtgctttcctaaggagaccccaagttgagaggaccctcttacccactcatcaataatcaaagcagacttgatgcccatcagagatgcccaatgattctggtgagccgttcctccctctggctgtcagtactggggagtatggtggggactttcagatagctcagtgaagctcagaaagagagggagttccccctgacacccgccccagtcagtaagccccggggcctgaggggcatccccactgctcgacctctccactctctcggggaggacgaggcagccttgacccacgagggctgatgaatgggtaggttatcggcaggctcctaggccaccagcttagaggtcacattgtcccttttagattcagtgtggcgggaatctaaaaggtcgaggatcgagaagcctgcaggatggcaaagtgagggaccccggcagtgcgacctcaggaatccactcccggaactctgactggggtgcctgtggaggctctgaaggtacagcagccaggcgctctgtggcattctgaatactggcacgcagccttcggcctctgccagcttttgtgagctgccctgcaccaggcagagggggcccccaggcctggcacagggtctgacacatggcaaatgctacagaaatagctgtggaccgcctgactgcaagatcgtattgaacatctggtgccgggcctcagcctgtgctgctgcagccaggagcaaatacggggaagtctggctaaggagaacgcatgcctgtgtgggccccaaggatccatcttgagatcaggaggaacaagagcccagtgaccttgacagccagctcaggcagcctgttaaatcccatgcccagaggtttctagcttctgccccagaggcccaagatgaggatgtggcagcacaggtaggccaagggaaggatgaactcaaagagaggtggccagaccacctgagacacctgttgaagtgcgctttcccattcccagacctgggagcttctgagaccaggtgcagaaaccagattacactcatctttctgacctaattcacagagtggatagcagcccccacctaagcacagccccctcactgggcaataagtcagcaacagcaatgctggccacacgggaggccctcaggtgtcctcaccccacccctaggtttactgacaggtaccctgcaggggagagggtggggccctgagctggactccacccaacactgccacctccccagcctgtgtcctccctaccacccgaggagctgaaggacccaacagcacaccctcagtggtttctgaaaggaagcaaagttctttctaccctttttcactttgggtgaaaacatgtggctgggttgacaagtcggt

SEQ ID NO: 44630 - DNA, 2300 bp, Homo sapien
ctgggcaaatcaactttctggtagaagcacaggaacatctggccccaacactcttctctccctctgcctaccccacagtaatcctcagaacctagagacctaatgacaactctccaaacttcattctaaagtcaggaacaagaattggaaacctcatcacaagtcagaagattgagacatgcttaaggttactacctatgtgttcagattagcaaggacaggagcacactgtaggtaccaaccgcttatccatggaaggctgctcctgagctgcactgggctgcatgttatatttgtgtgcctgttgtctacaaacactcctatcccatcagaagtacacaagggtttgtcagatgacttactggccacgagtgaatcaatgaattcttctcaggaagagaaccagtttgccttttaaaaatgctgacagtgaaacccaagtgaggaaactcacctgctgcacccagcgtgcagcccacactccttcagtggtcctttaggagttggaaccaatctagtttcccagcctcttctcccatgacttcactctacgaatgcgtctgctccagccacgaaccttctctgggctcctcgaatgtacctaaccctttcaggctgtccttcccccatttcccacctaacaaaacccttttgaccttcaaggcccagctcaaacaccccctcctctacgaagcctcccccagccccctgcccagagtgagcagttccttcctcttcacattcacctaactcctcttgcctgtaagatgcccccttacaagtaacaaagacatgagtgtgcacctaccttcaaggagcctctttcaggagggggcctggcttccatctgctttctgacatactttgcatggagatctgccctctcctgccaggctgtgctcacaccaataccaagagatcacgagacgccctgccagcaaatgccctggaagcacatccccttcatgcccctggcagtcatctaatgtacacacaagatcaaagcagctctcaggtggcctgttgcagggcacagcacagttctgcctatgccaaggcagatgctgggcccttccctattgtgttcagcacgcacccattctccagggcaccttttctgagcattaatttatccagtcagttaatatggattgcacagcctgctatatgccaggtaccatgtggaccccatcacccgtacccaatgcaggcccctctagtgggcaacccttgctccacacctccctgttgggctgctcgagactgtcaggtcgggctcaacctgctctccagccctgtttccttcctatccctttcctgagtgttagttagccccagtaaatctttggccctgccaactccctctcatggtctgcttcctggaggacacaatctgagacagtgggttccagagtggtctgagaaagcaggtggtaaaatggggtcttggtacaggattgccccgcatctgcccaactggcaacaaggttcccatcttcgggagtaggtggcacgcaggcggctccaggcacaagatggcaggctagttgccagacctttggtgttagaacttttgctgggatggccggcttgtggagaggaagttcctggcaggtgaggagatccaggcagggcggatgcctggaaatgaaaactcagagaacagacagtggtgagtatatttcctggatgacccacaggggattaatgagaggccaagagcaattaacaaacatctaaaaattaagcagaaacactggagtcttcctggtggtttacaaagtagcccccgatccaggcaatgggcgagcagcaaaatctgaaggacaaacccaggacttgctaaggtggctgaactccgaagacgggtgaacgctcagccaaggcaggtctgtcatgccaatgacaccagccctgttgggaaaacctgtgtccctgatacatggaacaggcacatctaggagaaggtctctgaatatctggtctccccagatgcccttgaaacttctgagcccgcagcatcagcccaccccctcccatgaagcgctgcaggcaccctatcccgaaggagaaataaataacacaagaattttccccacaggtgtcctccctcccaggagtggccctcaccttatcactggctgccaggtagggtgaccaacagtcccagtttgctgagtgaattgcagtgctaaaagccggcgagtcccagggaagcaggacgaattggtgagccgactgccagacccgtgaccagagtgaaggtgcagcgcagcgccatgcaggcagggtgtgctggg

SEQ ID NO: 44631 - DNA, 2300 bp, Homo sapien
gcattcatttgtccgccttttagctttacttttctgccctggactcacacagggtcatgtgaacgtgtggtgtagcaggaggagagaggtaaagtggaggaataggagctggaagggaggaggagggaagaaaaaaggagggggagggggaggagagggagtgggttggaggagggaaggaggaggagaaggagaggaggaggagatgagaccaaggacaagaggtgaaggaagagaggaggacacagaaaagagaagaaagaggagaggaggagacggagaagaggaggaggagcagcaaagaaggaagaagaggaagaggactagaagagcaagtaaggaggaggaggggggagtaggaggagaggagaaggacagaaggagaaggagaggcagatgaggagaggaggtcgaggagaggaggaaatgagaaagaggaggagaaaaggagaggagagggattaggggggaggaggaagagaaaacaggagatggagaagaggaggagtgagagaaaagaggaggagaggaggggggaggacggggaggaagggagaaggagagaaataggagggaggaaaggagaggtgtaggaggaggaggacaggacgagaggaggagcagaggaggaggagaaggagaggaaggggaggagatttggaggaagaggagaggtggaggaagaaaggagaaggcggagaagaggagaaagcagagaggaggaggctgaagaaaggaggaccatttaggagaggaggaggaggaaaggaggaagaggaagagtggaataagaggagcagaggaaaaggaggagggggtggaggaggagtgaagaggagaggaggaggaacagagttggaggaggtggaagagagaagagaaggaggagaggaagagagaaggaaatgagaaggagaaaagtaggaagaagagagaagaggagagagagaggagaggatgaggaggaggagaggagaaggagagcaggaggtgggaggaggaggagagtaagaggaggaaatgaggaggaagaagaaagaaggacagcagatggagaggaggaagagagaattaggagaggaggaagaggggaggagaggaggagaaggaaacgaggaggaggacgaagctgcatcacccttatcaggttccagttctcggtgcgccccgttctgcaagacactctcctgtggtcagccctggcctgcagaggattcccgcgctggatctctgaaggatgctggcgccctctctgcagcacattcctgatgcccttgctgacacatgtgtcctctgggtcctctcctgaaacctgatcctccggggtgtcttctggcctcacctcttctgtccagttccagcaagctcactttgcttagcctttgaatcccttccttcactgtctgctgtgacaattcgggcctttcactgtcactcaggcctggaccatcactgttgcccatcccatgccatcaacaggtttgccccatcccttcggctccctaccagggcattcagttgtgttgagcagcagagtgcctccaagtccccactggttgagctgcatccgggtcccatcccacagggaccccccctggccgctgcaggtgcatgctgatcctgcagctcctcgagggtgtcatcgctttcccccttcccagacccagcacaccctgcctgcatggcgctgcgctgcaccttcactctggtcacgggtctggcagtcggctcaccaattcgtcctgcttccctgggactcgccggcttttagcactgcaattcactcagcaaactgggactgttggtcaccctacctggcagccagtgataaggtgagggccactcctgggagggaggacacctgtggggaaaattcttgtgttatttatttctccttcgggatagggtgcctgcagcgcttcatgggagggggtgggctgatgctgcgggctcagaagtttcaagggcatctggggagaccagatattcagagaccttctcctagatgtgcctgttccatgtatcagggacacaggttttcccaacagggctggtgtcattggcatgacagacctgccttggctgagcgttcacccgtcttcggagttcagccaccttagcaagtcctgggtttgtccttcagattttgctgctcgcccattgcctggatcgggggctactttgtaaaccaccaggaagactccagtgtttctgcttaatttttagatgtttgttaattgctcttggcctctcattaatcccctgtgggtcatccaggaaatatactcaccactgtctgt

SEQ ID NO: 44632 - DNA, 2300 bp, Homo sapien
caaagagtgtttggcttaagggtggggagagctgagccgactccctgaactgctaggacttaaacctgagaaggcccagcagcgttttcactagaggattgctggggacagatttgtgacttagaaactgagccgatggaatgtggacgacagacctgagggaagaaagacagaggactccaggttgctcaggaggctcatggaacagtgcaggctccagaccacgaggcctgaattctggaagtagcagcggggatgcaggacgaggagccgttttgtctcatcaggcactccagaggcagggacccagaacttggttatgaagtcaatgcgggagactagataaggggagggacagaggagtaaagcatggcagcactacagaacctgagcccgtgactgagagaagagagtttgaaaagcaagtttgccagggaagttgggctgtgtgctgggcgacttaggtcggaggaggcaagacattaagagtggggatgtttctcatcacctgcaaaagagacgttaaagagacggttcctccggaccccactggcaggcactgacagagcggctaggacacaggagagcaggcctggggggctcagccctgcaagactcagcctagagctgcatagaccccagtcaagtgttcccgcccttcttgctgcttccgtgccctatgggggtagacactggaggtgcagttaggtcgctgcgggcaagttttgactcttgcctaagggtgcatcacagaagggcctcagctccctcccccagctccacccacagctccacccccagttcggctctgcttcatttcaccagcatctccacccccagctcctcctccggcagctccgccccagctgttccgcccccagctcttcctcctcccagcacttaaccagttccacccacagctctttcccacaactacgccctcctcttgcaggcggctcctccagaagctctaacccagttcctgctgcagctccacccccagcttcgtttcccacagccccaccctgctcaccctgcatctccagtcccagctccgcctcctctagccccgtcccgcttctcctacccctctgcccaccccagcacctttcagctctttcctccagctctgcactagctcctcccccaccattctcacccgccagccttactccagcttggctcccccttctccagcaatttcccgcagccccgccccatctgctcccacacctctttgccacagccccgccctgctcctcctccaggaacgcccggctttccctcagctccacgctgcagctgagctgtgcaccaggccctcccacagagctttctcgtgattccaccctacacctccccaagcccccgctcccctaagctggttctcaggagtccgaggggtcctcccgcagctgctcctcgctcagttctcccattgccccgccctgctcttcgcggggctgcttccaaagccccgacctcagccagcagtttctctcagccccgcccctccctgccccgcccctcccctccctgccccgccccgcttctcccgcggctgctcccaaagccccgccctcggccccctccccaggagtttctctcagccccgccccaccccgagccccgcccgcagccccgacctgcttctcctgtggctgcctccaaagccccgcccccaaaccttccccagcattctcagcccccccagagccccgcctctcccagccccgccctacttctcacgcagctgctttaaaaaccccgcccccagcccctcccagtgatttctttctccccctccctccttctctcagcggacacctgcctccccctgctgattctcaagagtccgcgagctcttcctgcagcttctcctcgctcagctctcccacggccctgcccacaatggtttctctcagccccgcccggccctgccccacaccccgcctcttatctcagccccgccctcaacccagcccccaattgtttctgtcagtcccgctcggcccctcccccagctccgccctcctcctctcagccccgcctccaccccctccccagcggtttctcccagctcctccctgctggtatagcagctctgggcccaaaactcctgcctggtgtcctcgtcccacccttccacttactcttcctccctcccgttccttttcctccttccggttcttcgtcgaggctgccggtctcgaggtcccctggccttggcctggttggctggcgcgcatcagggccaggtaaagagaatagcgtctcctagcagccagggcgtgcgtacg

SEQ ID NO: 44633 - DNA, 2300 bp, Homo sapien
taatcacagcagtgggaccctccgcacctgtctgggtcaaggaccacagggtgcaccagcccgcagggcagaaaatcatttcaccatgttgagcagcattcttgcagccaagcatgctccattcgaagggagaaaaatgacacttcccctcccattgtcacggggcgagtgtttgggactctaaatcccattgtcctcagcttaattctgggtaggtcacgctgagcacggcgccacaggccacagagctgtgcaccgcccggcctcaggtccaggcgagctcacagcagaagggccaacgggaggcagggaagaccggactgaggtggggccgctgtgtgtggagcagtacacgggctttctactcgcagacgcacgtcgcgggtacacgcgcttagaaggagcggagccgagaccctgccgacagcaggggacaggaaaaggcgcctcggtcgcgccccgcacgagttcccagccccacatccagggaaaccccagccctcaggtaccgtccgcaagaaggctgagcacacaggctcccgcagcatgggccctggcacctgtcagccccggcaggtctcacggcctccggaaccatggaccctgcgagtcgtgggtgtctagggccgactccggcttttcgccacaggaatgaacagtcctctgcttccccgagacccagcgaggccaccggagccaggacgatgggctcccaagcaaggagacgtgggccgctgtgagaagagggagcgcctggctagtgtccaggctgcaaggtcgttgccgctaactccgggaaaccagtggccagtgacaggtgttagcggtctataactcttccgctttcatacagctcccgtcatccctttcacgaagaacgtacgtgggcgcgcaatcacgcatgtatgcacaccacgcacgtacgcgggaggcacgtactcagccatgcatatagacagcaaacattatgaatctcgcattctcgaagacacgcactgacgacatcacgcacgtacgcacgccctggctgctaggagacgctattctctttacctggccctgatgcgcgccagccaaccaggccaaggccaggggacctcgagaccggcagcctcgacgaagaaccggaaggaggaaaaggaacgggagggaggaagagtaagtggaagggtgggacgaggacaccaggcaggagttttgggcccagagctgctataccagcagggaggagctgggagaaaccgctggggagggggtggaggcggggctgagaggaggagggcggagctgggggaggggccgagcgggactgacagaaacaattgggggctgggttgagggcggggctgagataagaggcggggtgtggggcagggccgggcggggctgagagaaaccattgtgggcagggccgtgggagagctgagcgaggagaagctgcaggaagagctcgcggactcttgagaatcagcagggggaggcaggtgtccgctgagagaaggagggagggggagaaagaaatcactgggaggggctgggggcggggtttttaaagcagctgcgtgagaagtagggcggggctgggagaggcggggctctgggggggctgagaatgctggggaaggtttgggggcggggctttggaggcagccacaggagaagcaggtcggggctgcgggcggggctcggggtggggcggggctgagagaaactcctggggagggggccgagggcggggctttgggagcagccgcgggagaagcggggcggggcagggaggggaggggcggggcagggaggggcggggctgagagaaactgctggctgaggtcggggctttggaagcagccccgcgaagagcagggcggggcaatgggagaactgagcgaggagcagctgcgggaggacccctcggactcctgagaaccagcttaggggagcgggggcttggggaggtgtagggtggaatcacgagaaagctctgtgggagggcctggtgcacagctcagctgcagcgtggagctgagggaaagccgggcgttcctggaggaggagcagggcggggctgtggcaaagaggtgtgggagcagatggggcggggctgcgggaaattgctggagaagggggagccaagctggagtaaggctggcgggtgagaatggtgggggaggagctagtgcagagctggaggaaagagctgaaaggtgctggggtgggcagaggggtaggagaagcgggacggggctagaggaggcggagctgggactggagatgcagggtgagcagggtggggctgtggg

SEQ ID NO: 44634 - DNA, 2300 bp, Homo sapien
aagagtgagagtaacctgaaaggacagacagctgctctaagtctgacgtcctcttcatcctggatgagtcggttgattaacggctagtcactaccaggcaaacattcagtgccaggtcccagactttctgtattgtcgcctggatgctagttacacatttgatgagttttgaccagaacaaatcaggggaaaacatagaacaaagcctcaaacactaaccagtcatctacaacacatttatttgtacaatccagaaactagcaggaccaaaattagcagcaatgctgagacatttactggcagctttgccttctaccctaaggtcaaagtacttgagacattgcctgtgtgcctaaggaggcatcacacaaggaaagccccaccccctacttccttcatctgagcaaaggaacctgtttacatgcacagtgcttagtgggtgggactctccaaagcagtggaaattcagatttaacctaatgtatacaggtctgcgtcatgatggcaaattgaaggtgtcatgatttagctggtttctctggaacattcctttcaggagcccacacttgtcacacttcatgccccaaagggatcaggtgctctgggatgtctacctggaatacatccttgcctcctttcctaggtatgggctccagtaaccacctggggtttgaaatcacagtcaggtacttctgcttcaggttggtcagtacagcttgattttctagttccacaacctcatcgggagttaagtcttcggggcattgcaaagtttccccaatgtcaacgagtcctgtacacaaagagagatacacatgaatgcctttcacttccatagcccaaggcctgcccatgtgacaacacagttactcaaagtcacaatcaatagagagtaagacagcatcagcaaaatgacaagaagggagtcaagtccttcttccgtagctttgataacgaaccaaacccgattcaggaaacgctgggagaggcagggggagggctccagaaaggcagaggagagggccttgtcctcatgaagccacacaagtaagaggcaggtccaagccagacttctgagggcagcggttgcagattggaagggcaccagccactgcctgggaagctacaggtgatgcctgagcaggtcaccaggggacagatgctgatgtcgggcctcagtcacctagaggttaggggactttcccagggtgctgtgagtggtggggctggggcaggttcatgaagccaggcgggcagcccaactctagaggccacctgacccattcggcgggctgggctgcttttcatggtctctgccacacatgtgcactcacacatgtatgtgcaaatacacacagccaaacaccacaaacaccatgtgcacatggccctgaccaggcttctcactgagatcagaaacaggaactgaggcccagagtggagaaatgatttaccagaactcgtggaagccagccataccaacccccagcccaaggtccttgccgcccctttgaaggtgtgttgccaaaggaaactgtgttatacacgccaatcagttcagatgacaagagaagcccccaaattcccaagcaagatcttgggcagcagccctaggcgttgtctgcgcatttggtacattgtcacttacccgctatcactcctcgaccaaacttttcccctttcctgagcaaggcctgaatctgagcaggagtcatcccgagtctctccaccagcagctcccgccaggcatcgccttcccagtccctgtgagcaatgtggacggcgatggtacagttccgctggctgctcagcaggggacgccagcgcgtctccacagtcttgattccatttaagacaaagccagcataaggctgccggaaggagaggcagccaaacttcatcttcgcaagcgccccgggcctcccgtagcctgcggaagcacagaagcgcatcacacgccagccctccaagctcatgggcagtggcctgaccttccccccgtgtctctcaggtggcctaaatcgcactgaccttgatggtctcctgcttccgtctgtcactgatgtccagcaccacagcaggcccaagggaaggggctgggattcggctgactcaggtccatcccatggagtctttggggcggtccggagtagggcggggacagctagaggaaggcacaggcaggataccatgtggtcagtgctatgacagaggtcaccgagccctagggcaacacagaggacagagggcccccttggcctagccagagtggagagtccgggctggtgttagccctcttc

SEQ ID NO: 44635 - DNA, 2300 bp, Homo sapien
ctaagggggttgtagtttaatatcaaaatccatactttttaagttctatacttttcatctttcaataaacaatatttcacattttcaaatgctatccttgacacttaagctcttacagtatattattcaaattggtgtcctatgaagatatgtttgagaaagagagaaaagggattacagaaatgctttctactttaccatcattttcttgtttcctggagagttgcttgggcgtgttttgcagaatccatagaggttcagctggcgaatgaaactcgtcaagctgtctgttttgaagatcctctctgcacctttccgttgaagaacctccctctggaagagatccttgtcgatgatcacggcgtctccatcatcgttccagctcacagacttgaatgtgtcttcctccacaatcgtccaaagctttcttgggaaggagagcctaaaaaggttgtggttgtcttccacgttgaccacgcgttggtttcggtcttctggtggtgagttatcttgggagcctggatcttggctcatggcttggtcctcgtgcctgtccaaaacctcgctggaatctggatttggatcaggtgaagaaccagatgggcccccgcttgttggctctccaccaacagatggggccagcttggcttcatattcctgttcagtgttctgactcgccatggagctacaccagaatcaggagcattttgtacccaaggcccttatcactgtcctagcaagtccaaaatgccttcagtcagagtaggcgtgcccaataaatactgtccacaaaattctagagtctcggtatcagggcaaccagtggcttaactcatcatctgctgtatttgtcacatgatgtcacaaaggtggctctcagccaatctggagagggggccctggccaggtgttgggggagtagacaggtggcatggccttcagcttctccctcttctaaaagtataaacaggcatggttcaagttcccagaaaagtctcccatcttctgacagtcacattgtgtcaaagggccaggccccagatgagctgagaaaccatggctctatggccactcccaaccctgaagacaggggaggccatttgctggcctctaatttgctcaagagccagcccctagttatccctagcttgggtttcaccaagactgcctgactcagatggacccctcatgggtgactgccttctaggagatggtggtccctaccaggctgtttggcctgatctgtgtggtagcacccctcttttccaatccccccatctcctttctgctttggtctcttccaggtactcctaatgattggttgcatgtgctccagtgggcccagataaagtgtttcttattccccttggtcaagttgtccccagagtggtgctgtgcctgagcatggtgggagcactcccctcactcgtctaccactgtgttacccagagcaccatttgtggttggatggccacatcctcagctgtgctttggagtctcctgtggagctctgcttgcccttgcatctcaccctcttgcagatcacaacaggagattacctttagtttcatttttgcccataaatactgttttcattgcccaagacatgttcatttctgaggcctgctttacacagactagcctaagaaaagtttctgcttgtctagttagacctgactaaagtaatccagcacaaaagttccatcattatgtatttgaaaacagatgagcgtatgagtgtgtgttgcggtggcaggaggagggagaaaacccaaatgaaagccatgttcaaccccagatgagaggatacaacagtctttctggtgatacattttctctagccattaaagacaactttgttcttaatattcactctgtatagggagacagagtgatacagtggaaaggcaccagactgaaaggaccctgggtccttgtcccactgagtagcaccctttgcccactcagggtcggccctgagtgcgaagagggttggaagaggctcttccaaggtgcttttcaatctcagggctctctaatccttcatggtgcccccaatgcctggatgcaggcttggttcatggtcaccaagctttttaaacaggtttacaaaggttttgttcaaggactcagtgtaacctgtagacacacacactctgaggctaaatattaaaatagaggccattggtgagatctctaaatgaggatccttgagtattcagttagacagctggtatctttcacttacataccaaagtgctttttcataggggaattcttaagactgagaatgacatttt

SEQ ID NO: 44636 - DNA, 2300 bp, Homo sapien
ggaaaaggctctgaaatgaattctatgtaagtacaaattaacaatgtttagcaaactaacattaaaaggaacttccatttcctaaaattggcagcaagcatacataaatgtgaaatgtcagaagctctgccattcacggcagtgacaagtcgttgacatatgctgtcaccactaccacctacatctgcagtgaatatcaaaatgaaaaagagccagagctatggatgtcaagatgaaaatgagatatgaagactgcaaagaaatagagtatttgttaactatatgattatctacatagaaaattcaaaggaatagacacattgaatattcaaatgaataaaagacttcagaaaacatcatacagaaggtcattaaagcaaaatcaagagccttgccacacaaaagcaacttagtatataaaatagaaaatagaaaatgcaccattcacagcagcattaaaatccaaaatgtaaataagaagagcctgacaagacctttatggaagcaactgtgcaaagttgctgatagactcaggaaataatctcaagtaaatggatctgtataccatattccttgatggggaacagaatatggcaaagatgtaaatgctacttaaattaaatacagagtgagtgccttaactgtcattgccaaagtgacaaccaagctcaggttgctgtgctctgctccccaaatcaaccccggaaaaaatataggagggaaaagattaaaaaaaaaaacccatcaaaacagagaaagccctggggatgactgaagactgtgctaaactagtacttgtgttttgggtccagggagcagcagggaaatcgaggaggtctgtaccctgcatagatggcagattacaggatggataggagaaagtgtttaacattccaccccacatcatcgcgcaatctgaggcagcaccacaaaatctgatgccagtagccctggagtaatatcaggacaccaggaaatttgagttgattgagacactatggctccagagttctgctaacaaccacctgaaacaaacttagtaggagaagaccagccttccaaaaaattattattttaatggaatataaagaatgaactaggaatagaatagtaagtatgtgtgaaggccacatactatgagtagatattaataaaatatgtgtgcatatatatagtataaagtctagaaatacaaacgaatatgtagctaaagatatatacatgtaagtaaatataagatataaagatatatatgcgtgtatgtatacatataagcatagatgtatataatgtctaaaacaggtatgtatataaacgtagatataaacaaaatgtacaataccatatataatgtacacatacagtgtaaaatttattaccatgtgaatgagaattaaaatatgaaaatcgctaatctggactctgctgtgttcgataccttcaaaacacatggcttctccaaatctcttgctgctgctcagcctcttccgtgtaaaaataaatcttttaggacaaaaggtttgcaaagtctagctctggctggggaggagcccccatgggatggtgtgcatcttctctcacaggtcctacaatcacaggtgctgcagccccccagggagcatctagcctgggacccgcagccattctctgcaacgcgtgcagctgggcaaatgctcaaaggtgacataaacagatcatctcccacacatcacttcatcaaagagccaggagccaggaggagaaccctcctgagaggggactgaaggtccaacctccccacatagaggggccacagaatccagctcagcccttcctgtcagccctggaagaccctggcaatgttgtcaccccgaccacacccctcccctcactgccacctcatgtgactgggagtcagagacttggtccgagaggagcagacccaatgggcagagaatggggatcgagacccaggcatcaaggtcaggaccccctgagggatgactgagggcccctatccccatccccacccctactccgccagaacccggttcagcccctactggcaacccagggaagctccaggcttgggggccggatgtgacgtcactgacgtgcgcactgggggtcagagagaagggagaggcctccttctgaggggcggcttgataccggtggaggtaagctggccgaggctctgtgaggagtcaaggtgaggtgctgagggaagactgaggatgtccccaccccagatagaggacccgaaagaaccaagtgccgtctctgctcccagccctggaccacccgggggccgatctggg

SEQ ID NO: 44637 - DNA, 2300 bp, Homo sapien
aggatggtgcgggcccctctcgagtgtgtaaaatatcacaggtgccaagtagccgtatctgcgtgtcgtcctccccggggccagccatgtcatctggcggttgctgtgtccccctgactccacagcacattaccctgtgaggtgagcaggccaggggagtctggtatttgtaccactgtcaccctagctggtgtctggagaggtgctcaagtggaagcactgaagggcgcctggcgcaggaggtgcagatgctcctgctgcccttggtaggtgggcccctggtgtggaagagccagtacccagggcctccaacccagccggggtgcattctgttgccagctgacactgcatgggggaggcccagaatcttcttccctcctggtctgcaacttcaaagaccctttccgccggccatggacaccctaatctgccattttgaggctttttccaagacggaaaggcccgccacaacttggtaaaccttgacgatgtgaacgcgagtccccagcttcctttggggactgggaccttttccagaaaggcctcctgggccagtagagttctcttgcacaggggcgtagatggttggtagttgtagtccatccttgtgacttgcagtttccttttgtttatttaaactttgacttatagttagagttctactgccatccttactttcaaagagactcccctcacctcctcgtgaggatgaagagaagagtgggtgtcaagtctgcaccaagacatcaggaggaggacaagccagaagctgctggatcctgtctggcaccagcagacactgagcaacaagatcacacgtctccgaatgagaatgaccaggtcacaccgcaacaccgggaaccggccggtcccaacacccaaatcaggagtggctctgctccaccagcaactcctgtgatggtgcctgattccgccgtggcgagtgacaacagtccagtgacccagccggccggcgagtggtcagagggcagccaggctcacgtcactccggtggccgctgtccctgggcctgcagcgctgcccttcctctatgtccctggatctcccactcagatgaattcttacgggcctgtggtggcccttcccacagcgtcccgtagtacccttgccatggacaccacaggacttcctgcacctggcatgctgcccttttgccatctctgggtaccggtgaccctagtggctgctggggctgcacagcctgctgcctccatggtcatgttcccccatctcccagctctgcaccaccattgcccccacagccaccgcacgtcacagtacatgccagctagcgatgggccccaggcgtacccagactacgcagaccagagcacatagagggcagcatttgggcagaatatgtgctggtcaataaatgtgtcagaaaatgagtaattttctgactgcacaaaaaagtcttcatggtctccatcctttttctttctttgcagtccagtacccccctccgacatctttggcttgcatgatagagacttcagcctaacacgcctccctggaaaagtgcccaggagatactcgagcaggtgctgggttttaggaagcccctcagacatcccgcctctactcattaaaaattacctggagctggccgggcgcagtggctcatgcctgtaatcccagcactttgggaggccgaggcgggtggatcacgagctcgggagatcgagactgtcctgactaacacggtgaaaccccgtctgtactaaaaatacaaaaaattagccgggcgtggcggcgggcacctgtagtcccagctactcgggaggctgaggcaggagaatggcatgaacccgggaggcggagcgtgcagcaagccgagatcgcgccactgcactccagcctgggcgacagagcaggactccgtctaaaaaaaaaaaaaaaaaaaaaaaattacctggagttgctcgctgagtgctaattgtgctgctagcattgccggcctagggttcacaatgactctgtgttactggccattccttgtcatggcggtgcctttatataacaggatcttcactttacatacagatgagatcacgtctggctttgtcattgggttaaaaagtgcccttgatagttgtggaggtgacacatactaccaaggagtcctacgggtttgcagtttagagggtgctcattagtgtctggtggacaggatttatgtttggcttttatgtctgtactggatctggtggggttttttacttccttccttgattcccccactatgcccccactttttctttcttgtttcccttcct

SEQ ID NO: 44638 - DNA, 2300 bp, Homo sapien
gacaggatccagcagcttctggcttgtcctcctcctgatgtcttggtgcagacttgacacccactcttctcttcatcctcacgaggaggtgaggggagtctctttgaaagtaaggatggcagtagaactctaactataagtcaaagtttaaataaacaaaaggaaactgcaagtcacaaggatggactacaactaccaaccatctacgcccctgtgcaagagaactctactggcccaggaggcctttctggaaaaggtcccagtccccaaaggaagctggggactcgcgttcacatcgtcaaggtttaccaagttgtggcgggcctttccgtcttggaaaaagcctcaaaatggcagattagggtgtccatggccggcggaaagggtctttgaagttgcagaccaggagggaagaagattctgggcctcccccatgcagtgtcagctggcaacagaatgcaccccggctgggttggaggccctgggtactggctcttccacaccaggggcccacctaccaagggcagcaggagcatctgcacctcctgcgccaggcgcccttcagtgcttccacttgagcacctctccagacaccagctagggtgacagtggtacaaataccagactcccctggcctgctcacctcacagggtaatgtgctgtggagtcagggggacacagcaaccgccagatgacatggctggccccggggaggacgacacgcagatacggctacttggcacctgtgatattttacacactcgagaggggcccgcaccatcctcagccctctccccacattcactcttagttcatgtcacctccacccagagggggacacaggcccacagcgatggccccacaccctgcctgaggtcgcccacttcccaggaggcagtcctgggacttccacccgaccaggccccagagcccaccgacttaacccctccagaggcttgtcgttcattaccttattcaagatggagaccagcctttttgcggagaaaatgcgggtgaaggtcctgaaagtgcattgacgccgttttcggaagccatacaagtttagctggcggaagaagctctttatcgaagttgtggcaaacactttgtgtgcgacgtcccttttgagaatctccttttcaaagagtttttgattgatcactctacaagccccactgtcatcccaccagatggacgaaaactggttgctgctgaccagtctccacagtttctgtggaaaggggagggagaggagattatcttctccctggggcgggacgtcaccgtcagggtgcggccttctgaacgaagcttcctcggccagaggttggaaagcgatttcttctgtcagcagcctcaagttagggctcccagtggaccccgggtcgtcccaggcaggggaaggatctgctgggtgaaggtaggtctctgactgcaactggggagggaaaggcaccctttccaagccatgatcctgtcctctcgaatttctttcttcacagcgagccatactcaatgatcgcttgtcctccatctggcaaacttgctagtgcagtgtggccagcagcaccccttggcagtcatgtaaccagccccatgacatcataaaggggctctgactgccggggggtggcatctccacccccagcaagttgtgtaataaagggccaaggcagacaagtagctgcccatctgcatgtgcacattctggtcctcacagtcatttcaatgggaaagatgacactagtgcacaagagtgccgaggggccctgccacaccgtagatgcagacctggagcggtccccttgtcctagagctcctgagccaggcacaactacagcaaagccctggctcaggaaggtcagagctcaccgtctgagtcatgggcccacagaccccagcacatgactgacactcggaagcacagaacaaagggtaggacggtgcccatgggtcaggctgtagccacgccaccctttccaccctgtcctagccagaggcagcaatgtgctccatacagatcctcctaacacacccacactgtcggtccccagcacgcagatgcccgacagccccttaggcaaatggcttagctgactgccccaccacacgccgtcgccatgcagtccagtggggagtcggaggcagcctccttcctgcctctcctcggcctgcacgtgtccccccaccaggcagagacccttctacaccccgggtgtctgcggtcacatcgcggtggggcatgcagctgttggccttcgagcatgttttgttttccttggccagtgtctccagagaaa

SEQ ID NO: 44639 - DNA, 2300 bp, Homo sapien
aaaaagagctttgatcttctcagccaggagaagagggtggtgttttcacgcgggcaactgctcgccggcctacatggggttaattcaagtctgctgcgagcacgactccgcccttggcactggcctccagcaagccctgttctctttggggtacaggggaacgggatggtttagactttcctgctcagtgtgtaaaaaatgtagctaaagccactatttttgctctccttaagctgttcaataaaccggttcctcattttacacgtgcatgatgtgtatcttctttgctggatgggccaggaaactggagtggtcctctcagccagcctcagaggaaagaaatctctagctggcacaggcagccagtgagtgaggctggcggctgcaggggcacagcctttagaatgagtccttcagtgcacaggtcccagggtatacggggtagtgggaggaaggaggggacgcctcgcagatgccactgttggctgggctacaccttgccacacttgttactgcttaggaggctttctggagtgttccttgggtgctacgacaatctgcagcagacactgtcctttcaccgctcctggtcctcgtttgctccccagtgatgtcaacagctgaggactgctcacgctgcaacaaaaggctctgcagtcgctgtctagcttgccctagtcgtctctagagttctgcctgaactgaaactcaagtggggttcagctcatgacttgtggcaattgaccaggaaattcaccagttgctgtggctggaaggattttcagtcctgtgggttgtaaccagaggccacaggtggattctgccttaggctcatgagatttccgacttgctgttgaagaaaatgccttgtgaagtgacaacagtagctctgacccaactgccggtgcctcgctagttcctatacgtcccactggatcctcacagccccgggaagcaggtgctactactcttatccccgggaggagacagaggccgagagaggttaagtgacgtgcccaagtcacacagctcggcagcggccgggttgagcatcagcagtctgtttgcagacccctcactgtcaccccctgagccagtgcgccttgggccctgcggtcaggatgtctcaagcgtggaggcatcaccggttcgtggcagtctctggaaggtcactgagctctgtgcccagaatcgagtcgggggagtctgtgcagaggtggccctgtgtgtggggacagtgtgtgacacagacactgctttggatggacacctctcccgtgacctcctagcatccaatcccaaaggaacaactgttgcagagatggaccgctggacacaaacccacgtgcgtttctctggagacactggccaaggaaaacaaaacatgctcgaaggccaacagctgcatgccccaccgcgatgtgaccgcagacacccggggtgtagaagggtctctgcctggtggggggacacgtgcaggccgaggagaggcaggaaggaggctgcctccgactccccactggactgcatggcgacggcgtgtggtggggcagtcagctaagccatttgcctaaggggctgtcgggcatctgcgtgctggggaccgacagtgtgggtgtgttaggaggatctgtatggagcacattgctgcctctggctaggacagggtggaaagggtggcgtggctacagcctgacccatgggcaccgtcctaccctttgttctgtgcttccgagtgtcagtcatgtgctggggtctgtgggcccatgactcagacggtgagctctgaccttcctgagccagggctttgctgtagttgtgcctggctcaggagctctaggacaaggggaccgctccaggtctgcatctacggtgtggcagggcccctcggcactcttgtgcactagtgtcatctttcccattgaaatgactgtgaggaccagaatgtgcacatgcagatgggcagctacttgtctgccttggccctttattacacaacttgctgggggtggagatgccaccccccggcagtcagagcccctttatgatgtcatggggctggttacatgactgccaaggggtgctgctggccacactgcactagcaagtttgccagatggaggacaagcgatcattgagtatggctcgctgtgaagaaagaaattcgagaggacaggatcatggcttggaaagggtgcctttccctccccagttgcagtcagagacctaccttcacccagcagatccttcccctgcctgggacgacccggggtccactgggagccctaacttgaggctgc

SEQ ID NO: 44640 - DNA, 2300 bp, Homo sapien
gagaaaacaaggaagcctattgagatctaacattccacccatgaagggaacttcagtaaaaaggagaatctcatcacagaatggggaacggggaagaaaggctgtgcatagactctgcagagaaacctacaatcaagaactggtcaggagaagtaaaattcgtatgccaactcaaatcatagatctaaaagaaaatgtaaaactatagatctgttaggaaataacataggacagaatctttggggtttgcaattaggcagagagtacttagaaatggcactgttaatatggtccatacgagagagaaatcataaatttggacttcctcaaaattaaaatgaaatgaagacaggccacagactgggagaaaatatttgcaaagcacacatcaaaacactgacttgcacccagaacatacagagaactcttaaaaactcaaaactgcaaaaagaaacacctaaaaattggcaaaagagttgacaatttgcgaaggggatatacacatggcgaaaaagcacaggaaaagatgctcaacgccattacaggttagggaagacaaactacaaccaggatgagggcccgaaacacatggcttcagaatggtgaaactcagcaacactgacgaggccacgtgcctgggaggatgcagaggaactgggacactccagtgttactggcgggaaggcaggtggtacgggcactgtagaaaatggtttggccatctctgatgcagttaaaagcgcacttcccgtgggacttggctgccccactcctgggtataagatttacccccagagaagtgaaagcgcgcagccttgtagaaacccacacaccagtgtttgtagcagtcttgtttgcattttggatagcggccttgtttggttttcacaaaccaccctcagcggacagtcagataaactgtaggcatccatacaatggaataccactcagatctgagagggaacgacctgtggatacagggagggaacaacttggatgaatctcattagagacattatgtggatggcgggaagccagtctcaacaggttacttgtctcgcgatgccatctacataaagttccagcagagacaaaagtacagtgagagaacagatcagtgtttgccggggctaatggtggggacggtgtgatagtgaagggacagcacggagagttttgcagggtgacagacctcttctgcatcctgccaacggctgtgtgaatctacttgtgtgaagactcagggaactcacaccaaaggaagacggtcacttttcctactgtatgatagataattaataaaaagggagaacggaggagtgtcgtcccaggaggcagggcaggagggcgaagacgtgtcacaggggagcctggccaagtggcgcccccggaactcgtcctctgggcttgtgtgtggatgagacaaggtctacctggtacgacagggacatactgggaatgcgcccttgccgtggaggcggggacccggcagcgctacgtatccagcatcaacctgtatccagcatcaacccgccaagttcactaacttggtaggggtgaggttagggatccttaggagcccaggcagccagactttctggggagcccattcccatttgtgttgccaaagtacccccagcaggttgtgggaatgttgcctgtgaagagagtctgttggggtgagatcttgtgtgtgtgcacagggtgacagttgtgtcccatttcccgggaagctgtgatggcagcagaacctagaggagcctgagagagtgtgggagagtgggcctctggaagagtagaggctgcggagccaggtgcagggctgtctgtcacccaaaggaagagggactgatgactcactgagcgtgtgtgtcccctggtggcagcaggccccatagtgaacataccataccttttctgtcctgagcgatgctcccagcagtcctgggagatggaacggtccttattcggctcacaggaaggaccgccttaactggacagacacagcaaggtgctaaagatgccttccatcagaggccaggttggaagctctaaagagacttctcttgctgttctctcacccacccccaggttgtgtgtgtcccgctgtggattctcatgtcctttctgtgcctggtggtcctctactacattgtgtggtccgtcttgttcttgcgctctatggatgtgattgcggagcagcgcaggacacacataaccatggccctgagctggatgaccatcgtcgtgccccttcttacatttgaggtaagcgttccacgggaagcctcttcagcccc

SEQ ID NO: 44641 - DNA, 2300 bp, Homo sapien
tgtgctcaggcctcaggccagaaagggcaaggcagcagaggggcaaggcagcaggctgagccccatttccccttgccataatactgctgtgcccctctggtaccgaaaatcaggagtttccagtgcaatataatattatacaagttacactgtattataatgtgtattgtcttttagtgtgttaaccaaattactgcagtattaaatgcaaattatactttgtttaactgattcttctcttcatttttagttagaaatcctgtgttctgtcaacattctccagtttatattcattgccttaagactggacaagatcatccactggccctggcttgtatgtaacttttaaaatccttaaataaacttcttttttattataaaagtaattcatattcactgtacaaagcttggaaaagacggacaagcagaagtaatagcctaatagtcacccataatcccaccatggggagataacatggttagtgtttttatgtctgtgttttatacaaacagtttggatataactgtgtgcaccattttgtatcctgatttttttgttttaatgttgtatcataaacattttatcatgttaataaaaggtctttataaacatgacttctaaagtttaattgatacaaaatattcttcaagtgcatgtatcagaccatcctcttatttctaaaatatggtatttccattgttgccagtgttgaatgattttaaatcatactgcagtatatatgtttatgcattaaaatttttgccttttgttttttggttgttttcttaggaaatagtccagaaatagtgttactgagctagaggttgggaactatttgagattcctatatacgtatactgcactgccaacttgcttttccaaaagccatacctggccaggcgcagtggcttacacttacagtcccagcactttgggaggccgaggtgagctgatcacttgagctcaggagttcgagaccaacctgtgcaatgtagcaagaccctgtctcaaaagaaaaaaaaaaaaagccatacccatttacactcttgctggtggtggcatctatgtcatgcttctaaactgtgacttcagttactgggcatttggttgaaattaactgtgaataaatgggtagatggatgcagagatagaaagataagtggcaaggtagaaattagagaacacagtatagattccactattaaatgcatggaaaaaagatggagactaaaggcagaagagttccattgccactgggaggtaaggtcatgctagtgtttttgttcggttttattttctctgttgtttgatgtataattttgcatacaatatattttatgtattaaatatagctacccttaaaaagtgaaaagtatagtaaagaattgggagcagagaagaaatgaagggaacctaagtatactccatatttaaagatgggaataatcacttctgcccaaagtctttgataaaacattcataataaaaaatattcagtcactcatcctacaacttcacagtgctgtatctggagaatggtcattgggttcaaaactgtttctgttgtgacgtgaaggaaacatatctaaacaagaccaaattttttcgtataagatactgtcagggaaaaaaaagattagtaattttgagagctttccacaaatgagaagaaagattttttctgcccttcatcctctgtagatcccagttgatgaagcagtctgagtacatgtttcccatagtgagcaagagaaaacaaggaagcctattgagatctaacattccacccatgaagggaacttcagtaaaaaggagaatctcatcacagaatggggaacggggaagaaaggctgtgcatagactctgcagagaaacctacaatcaagaactggtcaggagaagtaaaattcgtatgccaactcaaatcatagatctaaaagaaaatgtaaaactatagatctgttaggaaataacataggacagaatctttggggtttgcaattaggcagagagtacttagaaatggcactgttaatatggtccatacgagagagaaatcataaatttggacttcctcaaaattaaaatgaaatgaagacaggccacagactgggagaaaatatttgcaaagcacacatcaaaacactgacttgcacccagaacatacagagaactcttaaaaactcaaaactgcaaaaagaaacacctaaaaattggcaaaagagttgacaatttgcgaaggggatatacacatggcgaaaaagcacaggaaaagatgctcaacgccattacaggttag

SEQ ID NO: 44642 - DNA, 2300 bp, Homo sapien
ggctccccttgtcccaccctcctagtcccagagctttaggactattagcagtgtaggggaggtggcttgaccaggagaccatgagtccctgagacagcagctggggaatgaggaaagtcaaagattggatgccgagaaggaaagcagagcctttgggggcaggggagaggggtaccctttaccgtttccaactcttgccctccctgctcttggatgcctccgctggcccaaattcctgggagttggctcacgccagcatgcaacctgcttgttgctgggacctgcgagagtctttcccttctctgccacagagactgtaactacataaagggaaaaagggggacttaagactgggaggctattatgaacctccactgggaaaatgaggagtacaggaattcccagaaggcagctgctcatgtgggaaaagtgtaaagttgaaactaccgcacctttttttttttttttttttttttttttttttgagacagagtttcgctcttgttgcccaggctggagtgcaatggtgtgatctcggcccactgcagcctccacatcccgggttcaagtgattctcctgcctcggcctcctgagtagctgggattacaggcacctgccaccatgcccagctaattttttgtatttttagtagagatagggtttcaccatgccaggctagttttgaactcctgacatcaggtgatccacccgccttggcctcctgaagtgctgggattacaggtgtgagccaccacgtccggccactacatcaactttttaaatttttgtttactaaatatgaaaatgattcagattgtgtaaattacatatcacatacatgtctaagaactgtaaaacagttacacagagagccttggcaggtgagggacattcatgtatagctgtttcagagttcttagattttttttgaaagattgatgacctgtgtggctgtatgtgttttatttttttatgagatattttcagatatctaatattaattgcttctcaaagaatgcaaagttaaataaacatttaggttctactaattgatatttagaatatattcaaacttctctttgttggtcttatttaagatgttttgagcaaggaaaggaattgtgtatgtggggttgaatgtaaggaatgtacaggcgtggtcattctcatgttaacattaaccagtggaacatggttgggtcctacaggaataacctctgatagcattttctctatgatctaacttccggtgtatttgtcacccacaatacatgtatatcataaatgttcatctgtattttgaataaacattgtaggcctttcagatgcattatagagccttttcctgattagcggccttaccattgctcaattgtagatctgttaaggttattgtgcatgatacttagctaattaaactgattttgtttgagaacagttttaactcttgttcttctttctctttcatgtgcaggtgttaatttatcttaatggaatagaaaggaaaatgaaaatcatttatacgttttatttgcatttaaaaatagcacctaacaatagttactactatcttgaaatataactggcacttgttcatagaactagagttatttttataatattgtgtgaagggtggtttacatggtttcttgaaaaatgaggatcatgagacttaaggggtatttgcctggttttagcagcagaagcaaatcagcttgaataatcttggaagtaactcttgttgttgaatttaaagatgtgaacagaagtgtttatgtacattgtcagggaaataagaactggctattacttttgagaatatccttatacggttaaaacattaaattctggtttggttgtaatgttcattttgtattatgtagtagttcttcgatgtttcagagattgcctaccaaagcttaggtttaagttagctttctacctgatttccctttgcttttgtcaaattttcaagtaaaattcaaagtataaatataagttggtatttgccctgaactgcttgcttatagtggagattctgaactgagggtgttttcttcttctctcccttttttagagcagaaggagaaacgtgtgtggagtttaaagccatgttgattgcagtgggcatccacttgctcttgttgatgtttgaagttctggtctgtgacagaatcgagagaggaagccatttctggctcctggtcttcatgccgctgttctttgtttccccggtgtctgttgcagcttgcgtttggggctttcgacatgacaggtcactagaggtgagatttcatat

SEQ ID NO: 44643 - DNA, 2300 bp, Homo sapien
ggtgcctgcatatgacccagggtctttctttaatgtcaggatcacttgtgggtctgtctacacaggtcattgaggctttggacctccatctagggtgggacactgagtgagggctctgaagtgagcagcaggttgtcagtagggtcttttgcacttgctggagagaggaccagatggccatctggtttctggcttttttttccccatgagagcaccagtagcataaagggttgggcttccagaatcagtccaggtaatccacctcttgaagactggggatgtgaagccttgggaaagtccagttcttcctgtatttcctcacagacaggttcatatgttcctcttggcaatttaccttgtcagagcaaaagaacacactgacaagtaatttgtgcatcagtgtcctgttgcctttgctagatagcttccagggcctggtcaactctggaagaactgctaaaattgaacttgtgggcctgcagagcagtggttcagctcccagactccctgggatctcattaaagtagcgtctgccctcaagattctggactctgaggagcctgcctggtctctatctatgaagctcttgaaagggcagtgatgcctgttattcaagtgtctgaactggcagaccatcttctcatgcctgcttggggcacggtcactggtaatgaagatggtgctgtccaatctgaccactggcaagcacctctttctaacagtatgggctgcaggttcagctagaccctgagtttcatctgtgctccttcacccttacttgctggctcgctcagggcctgttatacaagcttctctgcgccttaattcctcgtctgtatttgagtgttcattgagaacctcctctgggctacacattggactttacccagaggatgggaaaggaagatgggtgaaaaagtctgggacagggtcctggtgcttcagcagatgaaaacttgatttggattactcaaccttaaaatcagctcatataataatatccatttcccagtgggtgttgggaagcttaattaccacttatgatatgtttttacgttctcagaagaaaggtgatacatcaagactaagtatgactatcgcaattgtgattctctcaagctgcccttggggctaaacagtataaaattgtcatttgtgaaactctgctattgcaacaaaggatgactattatccataatgatagtagactaatgtttaaggcattgttgtgctcatgaaaacttaaatctgcccaaagtgaagatggtaaactaggtcacctgctatgagcttgtcctgctcttggattccaaaagcaaacaaaatccttgaggaggttgacacctgaaagagtaccagatagcaacagcattctttgtacacctagcatgtaccaggcagtgtgttatgcacacgatctcactgaatcttcctaacacgcttagaaaagaggtttttatcatttccattctgcggaggagaaaaactgagactcaaagatgttgacttgcccaaggaagatgaacctggtacttgtaagtagggcagcctggagtggaggcagaggtcaggtgtgaagtgaccacaaagtttagacaggatccaaggaggctctgaactgggttagaaaaatgaggatgatttccacgtctcctgcttgaatacccccctgcgtacgaataggcctgctgctaagggaaaaagggaacccaggaggggaaggcggttggcacgggaagtgactttggtgctaggtaacttgagtagggaatagccagcatatctggacacgctggcttgggaattggaagggaagttgggacccaaactttggagtcgttgacagatgtgacaggtgaagcctgggatgacatcgccaaaaatgcaacgtctcactcattgtcactactcccagggctcagtcgtcactggggaaaatctccagaaggtagcgcgggccaaggtgacaggtgtctgccaagatctgcccgccagactcccgggcggcgcgctccctccctgcaggccttcagcccgtcagcatccccttcctcggggccctgctcactcccagcctccatccccctgccatctcctccgccggtcgcgtgcggacacaaggatggggacctcccagcgaggagcgctctgggcggggctccggacgcatgcgcggccctcgtacggaagcccggaaggaggggcagggggcggtggctcaggtttctccgggcggcggcggcggcggcggcggcgacggcgacggcgacggcagcggggacggcagcagtagcgggagc

SEQ ID NO: 44644 - DNA, 2300 bp, Homo sapien
ataagaggtatgtatattggaaagaaagagtgatatttggtagggtaatgcaacagtctatctagaaaattcaaaaaaatgcacacttgaaatagtcaaatgaataagagacatgtgaaaaatagcgaacagaagatcaataaagcaaaatcaaaagatttgcaaaacagacaataactattaagaacaggtcatagaaaataccccattcacaatagcaacaatatccaaaaattacctaacaagaagactaacaaaagcatgtatgatttttactgaggcaactatacaagtactgatatatccagttcaaagagcacccaaataaacaaggcagtatatgatatcattgatagggaacagaatattgcaaagatggcaattctattttttcaaaaattgacagacgtaattccttaaccagccaagatgactgtcaagctcaggcatctgttggtttttgattgtttggtttggttttgtttttttgagacaggacctcactctatttccaaggctggagtgcagtggtgtgaacacagctcactgcagcactgacatcctgggctccagtgatcctcccaccttagcctccctaccagctgggactgcagtcacacgccaccacacccagctaatttttcatttcttttttctttttctttttctttctttcttttttttttgagatggggtcttgttatgtagttcagattaatcttgagctactgggctcaagtgatcctcctgccttggcctaccaaagtgtttggattacaggtgtgaaccaccgcgttcagtcttgggcttctatcttagactccccaaaacaacccgggaaaactaaagaataaaaataaataaataaaggaacaagcaaacaatatcaaaaaagaaatctaaacaaaaaaaacatgagagagccctgagaatttcattgtattttgaaggaatacttgtgattgggggggaagagtggcagggaagttggggtggataggaagaaagaaatgtttaaaattctgcccctacttcactgtggaaaactcgggtagggtctcagaccacaggtgccagtagtcatggggtaacttcaggacatgaggaaacactggttgattaaaggaatacggctggaatttgtgctgataaccactaaaaccacgtcagtagataaagattggctttttaaaaattatcgttttaattgaagataaagaatggattaaattagagtattgaccattagagtgaaataggcagttaggttaagtatgatttttgacactgaatgagaattaaaaaatgaaaatcactaaaatgaactatgaagtgttagataaattctaaacgcaggacttccgcaaatttcttgcagccactcagcctcttcagtgtaaaaataaagctttcagggcaaaagtttgcaaagtctagatctggctggggaggagcccccgtaggaaggtgtgcatcttctcccagaggtcactacaatcacgggtactgaagccacatggaagcacctagcctgggatccgcagctattgtctgcaaggggtgcagttgggcaatgctcagaggtgacagaaacagagcatctcccacccatcacttcatgaaagaaccagtagccaagaggaggaccctcctgagtgaggactgacggtccaccctccccacatagaggggccacagaatccagctcggtccctcctgtcagccccggaagaccttggcaatgttgtcccccgacctcacacctcccgctcactgccacctcaggggactcagagtcagagacttggtccgagaggagcagacatcattggcagaggacggagctccaggctctgcaaggaatcaaggtcagaaacctgagggaggactgaggcacccccatgaccctcgaccacatctgcacccctcgccactacttttccccctgccccaccccgccccgccccgcctcgcctcgccccgccccgcctcgcctcgccccgcccccacacgggcagaatcgggttcgctcctgctgtaaatccagggaagctccaggcgtgggggccggatgtgacctccattggcttccgcctctgggatctgagagaagcgaaagcgtctttctgaggggtgtcttgagagtggcagagggcagcgggtccaggctccatgaggaggcaaggtgagagctgagggaggactgaggagtcctcctacccagatagagggccccaaataatccagcgccaaccctggagccagccctgaaacaacaggggaccaaattatcaggctga

SEQ ID NO: 44645 - DNA, 2300 bp, Homo sapien
gcctacttcagaggatgtatggaaactcttggatgttcaggaagaagattcttgcaggggtggggccctcatggagaacctctgctaaagcagtgatgaaaggatatgtggggttggagcctccacacagtgtcctcactggggtattccctagtggaactgtgagaagagaactacagtcctccagatcccagaatgggatcttccttgagggaagttgggtggggggttgtaccctgcaatgccacaggggcagagctgcccaaggccatgggagaccacctcttgcatcagcgtgacctagatgtgagacatgaaatcagaggagatcattttggaaatttaaggtttaatgactgacctattggattttggacttgcatggggcctgtagcccctttgttttggccaatttctcccaggtggaatggatgtctttacccccattgtatctaagaagtaactaacttgcttttgattttacgggctcatcggcagaagggacttgccttgtctcaaatgagatttggaagttgtacttttcagttaattctgaaatgagttaaaactttgggagactgtcaggaaggcatgattttgttttgaaatgtgaggacatgagatatgggaggggccaggggcagaatgttgtggtttggctgtgtcccaccaaaatctcatcttgaatggtagttcccataatccctatgtgtcatgggaggaacatggtgagaggtaatttaaccatggggatggttaccctcatgctgttcttgtgatagtgagtgagttgtctgatggttttatatggggctttttccccttttgctcagcacttctccttgctgccaccatgtgaagaaggacatatttgtttcccctcctgcatgattgtaagtttcctgaggcctctctagccttgtgaaactttgtgtcaattaaacctctttcctttataaattacccagtctctgccagttctttatagtagcatgagaatggactaatgcagtcagactgaccagatggcagggaaggagagaagacaggacaccatcagctcatgaggggcattaggaggatccaagaaagggcaactgccagagtccatgagagagaccacgcacacaaccaagtccacagagccccaggcaggctggcactcagagctctcaatccagagttcagcccagtgggatcagggacctgagggatataaggggaaaggcagtagggaggacaggacaatgagcaggaataggcttgggaaatctgggaaccataatctccagctgaacatggccacgtgatgtgagtgagcaggcccggtagctgaatgcaccagggcatttcatctgctttcatctgttttcatctgctttcacaccacaacaatcaacacagaagacttctgtgactgaatgtatggggatttctcctcaccaaaaagcaagaaatcaattctacagcagacaccagctaggtgccttttaattcaattccattctgacgctatctatctggagatagcatcagatccacaggttgaggactcagtcccacaacagtgccctctcttcagatgctagtcaaaagtccaggcctctggaacttctaactgattggcttcaacttcaggttgtcatgaccccttctttaggcttgatttgctggatcagctcacaaaactcagggagatatttatgtttactggtttataacaaaggatattttaaaggacacaatgaaacagccatataaagaggtacatagggcgagttctggagggtctgccctgcaagggcttctgttcccatgcagttggggtgcagcactctcctggcacgtggatgagttcttatgcacctttctggaagcctccatgaattcagctgttcagaagctctcaatatcctgtcctcctgacccttttactaagacttcattggataggcatgattgaagcatggacagatgtgtagaaatatgattggacagaaagatataacctaatactaagagactgagttgggaaaccagcaaggcctgtctgttcagattcttcctgttctccctgagcagcattgtgtcctccagggtatgggtcaggacctcttctgaaatgggagtttaagacctacaatcagacaaggtaggtcagagaatttctttatgaccagctctaagacaggtgaggagagatgactgtttttagtttctatggcttgtcttagggagaaaaagaagaaggtgaaaggggggcaaaagaaagttagaaagcgagattgtgttttccgagg

SEQ ID NO: 44646 - DNA, 2300 bp, Homo sapien
gtgcctttcgcctcctgccatgattctgaggcctccccagccatgtggaaccgtaagtccaattaaatctctttttcttcccaggcttaggtgtgtctttatcagcggcatgaaaacagactaatatagcttgacagctcatttctttttattgattaatagtgttctattaaatggttgtaccacagtttgtttatccattcacctactgaagaacaacttagttcaatccattactgacaattataaaataagctatgatacaaatttatatgcaagattttgtgtagaattaaaatttcaaattacttggattaatacctaggggtgtgttctctgaatcacatggtaatactatgttcagctttgtaagaaactcacaaactgtactacaaagtgactgtactatttgcattcccaccagcaatgaatgattctttttgctcagcatccgtgccagcaattgatattgtctgttttttttaactttagacactctaaatatgaaattaatgtagctattccagctttcttttgtcagtgttagaatacctttttcaacctccttacattgaacttatgtgagtccttataattaaaaatgggtttcttatagacaatatgttcttgagtattattttttattaattctgacaacctgtcttttattggtatacttagaccattcaaactgaaagagattattaatataattcattaatatctaccatgcatgtaactgttttctatgtatttaatttttctttattcctcttctttttctgtcttctttcgctttataaaacatttagtacatgtaaaattacaccttttttaaaaaaattagtctttgtcttagagtttataatatatattttaataacatgccataaaacaacactatactgcttcatatgtactatagataccttataaaagagtatactcagttccttcattgcattgcttgtaacattacaatcatttatttcatttatccatatacactagttgtctgatacattgttactattattaacttaaataaatagttaccttttaggtcagttaagaataagaaagcattttattttacctttatttatttcttctctggtattctttctttatctagacctaaacttaggacctatataagattcctataattgatagagaaaagtagaaaatcagtaagagcaaagaagatctaatgaccattaaatgcagagtatcatttgaaaatttcaacacattttattttaaaaaattctcagcaaattaaaaatatatgtgagcattatcaattcattaaaggaaatctacaaaaaaactagagctaagaatatgcttaatgatgaaatactgaatgttttccatctaaggtcaggatcaaggcaaaaataacggatttcatacttctcctcaactttttctattagaggttcaaactattgcaatagagcaagagaaagaaatgaaaaacatgattcaaaaggaagaaatacaatggtctttactgcaaacaacatgatggtcagtgtggaaaatcctaaggattctacaaagaaaaaaggaaaactgcaattaataagtgaatataccacggttataagatacacatttaatacaaagaaattaatactatagctctatactaacagcaaacacatgaaaatgacaaaaagcaagtgctttatgaatagcaaaacataaaatactttggaatacatttaatgaaaagtttgtaagacctgtacactgaaaactacaaaatatgacagaaaaatttgaaaacatctaaataaatgaagagataatccatgctcatacctgagaaaaatctaaattgttgttttattctattgcttataattcagtactaccattatttatattgttgctcaaattttccagcttttgggagcccttttagtctttggaagctcctgtaccctttttatatactgcatcatttcttaagcacgtctttattttcctgcaccacaaaatgcgaagctcaccttgtattttctatgccccagtcctagaaccaaataaataaataaatttggacttcctcaaaaataaaataaagacaggccacagactgggagaaaatatttgcaaagcacacatcaaaacactgacttgcacccagaacatacagagaactcttaaaaactcaaaactgcaaaaagaaacacctaaaaattggcaaaagagttgacaatttgcgaaggggatatacacatggcgaaaaagcacaggaaaagatgctcaacgccattacaggttag

SEQ ID NO: 44647 - DNA, 2300 bp, Homo sapien
acctgtacactgaaaactacaaaatatgacagaaaaatttgaaaacatctaaataaatgaagagataatccatgctcatacctgagaaaaatctaaattgttgttttattctattgcttataattcagtactaccattatttatattgttgctcaaattttccagcttttgggagcccttttagtctttggaagctcctgtaccctttttatatactgcatcatttcttaagcacgtctttattttcctgcaccacaaaatgcgaagctcaccttgtattttctatgccccagtcctagaaccaaataaataaataaatttggacttcctcaaaaataaaataaagacaggccacagactgggagaaaatatttgcaaagcacacatcaaaacactgacttgcacccagaacatacagagaactcttaaaaactcaaaactgcaaaaagaaacacctaaaaattggcaaaagagttgacaatttgcgaaggggatatacacatggcgaaaaagcacaggaaaagatgctcaacgccattacaggttagggaagacaaactacaaccaggatgagggcccgaaacacatggcttcagaatggtgaaactcagcaacactgacgaggccacgtgcctgggaggatgcagaggaactgggacactccagtgttactggcgggaaggcaggtggtacgggcactgtagaaaatggtttggccatctctgatgcagttaaaagcgcacttcccgtgggacttggctgccccactcctgggtataagatttacccccagagaagtgaaagcgcgcagccttgtagaaacccacacaccagtgtttgtagcagtcttgtttgcattttggatagcggccttgtttggttttcacaaaccaccctcagcggacagtcagataaactgtaggcatccatacaatggaataccactcagaactgagagggaacgacctgtggatacagggagggaacaacttggatgaatctcattagagacattatgtggatggcgggaagccagtctcaacaggttacttgtctcgcgatgccatctacataaagttccagcagagacaaaagtacagtgacagagaacagatcagtgtttgccggggctaatggtggggacggtgtgatagtgaagggacagcacggagagttttgcagggtgacagacctcttctgcatcctgccaacggctgtgcgaatctacttgtgtgaagactcagggaactcacaccaaaggaagacggtcacttttcctactgtatgatagataattaataaaaagggagaacggaggagtgtcgtcccaggaggcagggcaggagggcgaagacgtgtcacaggggagcctggccaagtggcgcccccggaactcgtcctctgggcttgtgtgtggatgagacaaggtctacctggtacgacagggacatactgggaatgcgcccttgccgtggaggcggggacccggcagcgctacgtatccagcatcaacctgtatccagcatcaacccgccaagttcactaacttggtaggggtgaggttagggatccttaggagcccaggcagccagactttctggggagcccattcccatttgtgttgccaaagtacccccagcaggttgtgggaatgttgcctgtgaagagagtctgttggggtgagatcttgtgtgtgtgcacagggtgacagttgtgtcccatttcccgggaagctgtgatggcagcagaacctagaggagcctgagagagtgtgggagagtgggcctctggaagagtagaggctgcggagccaggtgcagggctgtctgtcacccaaaggaagagggactgatgactcactgagcgtgtgtgtcccctggtggcagcaggccccatagtgaacataccataccttttctgtcctgagcgatgctcccagcagtcctgggagatggaacggtccttattcggctcacgggaaggaccgccttaactggacagacacagcaaggtgctaaagatgccttccatcagaggccaggttggaagctctaaagagacttctcttgctgttctctcacccacccccaggttgtgtgtgtcccgctgtggattctcgtgtcctttctgtgcctggtggtcctctactacattgtgtggtccgtcttgttcttgcgctctatggatgtgattgcggagcagcgcaggacacacataaccatggccctgagctggatgaccatcgtcgtgccccttcttacatttgaggtaagcgttccacgggaagcctcttcagcccc

SEQ ID NO: 44648 - DNA, 2300 bp, Homo sapien
aaaaagagctttgatcttctcagccaggagaagagggtggtgttttcacgcgggcaactgctcgccggcctacatggggttaattcaagtctgctgcgagcacgactccgcccttggcactggcctccagcaagccctgttctctttggggtacaggggaacgggatggtttagactttcctgctcagtgtgtaaaaaatgtagctaaagccactatttttgctctccttaagctgttcaataaaccggttcctcattttacccgtgcatgatgtgtatcttctttgctggatgggccaggaaactggagtggtcctctcagccagcctcagaggaaagaaatctctagctggcacaggcagccagtgagtgaggctggcggctgcaggggcacagcctttagaatgagtccttcagtgcacaggtcccagggtatacggggtagtgggaggaaggaggggacgcctcgcagatgccactgttggctgggctacaccttgccacacttgttactgcttaggaggctttctggagtgttccttgggtgctacgacaatctgcagcagacactgtcctttcaccgctcctggtcctcgtttgctccccagtgatgtcaacagctgaggactgctcacgctgcaacaaaaggctctgcagtcgctgtctagcttgccctagtcgtctctagagttctgcctgaactgaaactcaagtggggttcagctcatgacttgtggcaattgaccaggaaattcaccagttgctgtggctggaaggattttcagtcctgtgggttgtaaccagaggccacaggtggattctgccttaggctcatgagatttccgacttgctgttgaagaaaatgccttgtgaagtgacaacagtagctctgacccaactgccggtgcctcgctagttcctatacgtcccactggatcctcacagccccgggaagcaggtgctactactcttatccccgggaggagacagaggccgagagaggttaagtgacgtgcccaagtcacacagctcggcagcggccgggttgagcatcagcagtctgtttgcagacccctcactgtcaccccctgagccagtgcgccttgggccctgcggtcaggatgtctcaagcgtggaggcatcaccggttcgtggcagtctctggaaggtcactgagctctgtgcccagaatcgagtcgggggagtctgtgcagaggtggccctgtgtgtggggacagtgtgtgacacagacactgctttggatggacacctctcccgtgacctcctagcatccaatcccaaaggaacaactgttgcagagatggaccgctggacacaaacccacgtgcgtttctctggagacactggccaaggaaaacaaaacatgctcgaaggccaacagctgcatgccccaccgcgatgtgaccgcagacacccggggtgtagaagggtctctgcctggtggggggacacgtgcaggccgaggagaggcaggaaggaggctgcctccgactccccactggactgcatggcgacggcgtgtggtggggcagtcagctaagccatttgcctaaggggctgtcgggcatctgcgtgctggggaccgacagtgtgggtgtgttaggaggatctgtatggagcacattgctgcctctggctaggacagggtggaaagggtggcgtggctacagcctgacccatgggcaccgtcctaccctttgttctgtgcttccgagtgtcagtcatgtgctggggtctgtgggcccatgactcagacggtgagctctgaccttcctgagccagggctttgctgtagttgtgcctggctcaggagctctaggacaaggggaccgctccaggtctgcatctacggtgtggcagggcccctcggcactcttgtgcactagtgtcatctttcccattgaaatgactgtgaggaccagaatgtgcacatgcagatgggcagctacttgtctgccttggccctttattacacaacttgctgggggtggagatgccaccccccggcagtcagagcccctttatgatgtcatggggctggttacatgactgccaaggggtgctgctggccacactgcactagcaagtttgccagatggaggacaagcgatcattgagtatggctcgctgtgaagaaagaaattcgagaggacaggatcatggcttggaaagggtgcctttccctccccagttgcagtcagagacctaccttcacccagcagatccttcccctgcctgggacgacccggggtccactgggagccctaacttgaggctgc

SEQ ID NO: 44649 - DNA, 2300 bp, Homo sapien
gacaggatccagcagcttctggcttgtcctcctcctgatgtcttggtgcagacttgacacccactcttctcttcatcctcacgaggaggtgaggggagtctctttgaaagtaaggatggcagtagaactctaactataagtcaaagtttaaataaacaaaaggaaactgcaagtcacaaggatggactacaactaccaaccatctacgcccctgtgcaagagaactctactggcccaggaggcctttctggaaaaggtcccagtccccaaaggaagctggggactcgcgttcacatcgtcaaggtttaccaagttgtggcgggcctttccgtcttggaaaaagcctcaaaatggcagattagggtgtccatggccggcggaaagggtctttgaagttgcagaccaggagggaagaagattctgggcctcccccatgcagtgtcagctggcaacagaatgcaccccggctgggttggaggccctgggtactggctcttccacaccaggggcccacctaccaagggcagcaggagcatctgcacctcctgcgccaggcgcccttcagtgcttccacttgagcacctctccagacaccagctagggtgacagtggtacaaataccagactcccctggcctgctcacctcacagggtaatgtgctgtggagtcagggggacacagcaaccgccagatgacatggctggccccggggaggacgacacgcagatacggctacttggcacctgtgatattttacacactcgagaggggcccgcaccatcctcagccctctccccacattcactcttagttcatgtcacctccacccagagggggacacaggcccacagcgatggccccacaccctgcctgaggtcgcccacttcccaggaggcagtcctgggacttccacccgaccaggccccagagcccaccgacttaacgcctccagaggcttgtcgttcattaccttattcaagatggagaccagcctttttgcggagaaaatgcgggtgaaggtcctgaaagtgcattgacgccgttttcggaagccatacaagtttagctggcggaagaagctctttatcgaagttgtggcaaacactttgtgtgcgacgtcccttttgagaatctccttttcaaagagtttttgattgatcactctacaagccccactgtcatcccaccagatggacgaaaactggttgctgctgaccagtctccacagtttctgtggaaaggggagggagaggagattatcttctccctggggcgggacgtcaccgtcagggtgcggccttctgaacgaagcttcctcggccagaggttggaaagcgatttcttctgtcagcagcctcaagttagggctcccagtggaccccgggtcgtcccaggcaggggaaggatctgctgggtgaaggtaggtctctgactgcaactggggagggaaaggcaccctttccaagccatgatcctgtcctctcgaatttctttcttcacagcgagccatactcaatgatcgcttgtcctccatctggcaaacttgctagtgcagtgtggccagcagcaccccttggcagtcatgtaaccagccccatgacatcataaaggggctctgactgccggggggtggcatctccacccccagcaagttgtgtaataaagggccaaggcagacaagtagctgcccatctgcatgtgcacattctggtcctcacagtcatttcaatgggaaagatgacactagtgcacaagagtgccgaggggccctgccacaccgtagatgcagacctggagcggtccccttgtcctagagctcctgagccaggcacaactacagcaaagccctggctcaggaaggtcagagctcaccgtctgagtcatgggcccacagaccccagcacatgactgacactcggaagcacagaacaaagggtaggacggtgcccatgggtcaggctgtagccacgccaccctttccaccctgtcctagccagaggcagcaatgtgctccatacagatcctcctaacacacccacactgtcggtccccagcacgcagatgcccgacagccccttaggcaaatggcttagctgactgccccaccacacgccgtcgccatgcagtccagtggggagtcggaggcagcctccttcctgcctctcctcggcctgcacgtgtccccccaccaggcagagacccttctacaccccgggtgtctgcggtcacatcgcggtggggcatgcagctgttggccttcgagcatgttttgttttccttggccagtgtctccagagaaa

SEQ ID NO: 44650 - DNA, 2300 bp, Homo sapien
aggaaaaggctctgaaatgaattctatgtaagtacaaattaacaatgtttagcaaactaacattaaaaggaacttccatttcctaaaattggcagcaagcatacataaatgtgaaatgtcagaagctctgccattcacggcagtgacaagtcgttgacatatgctgtcaccactgccacctacatctgcagtgaatatcaaaatgaaaaagagccagagctatggatgtcaagatgaaaatgagatatgaagactgcaaagaaatagagtatttgttaactatatgattatctacatagaaaattcaaaggaatagacacattgaatattcaaatgaataaaagacttcagaaaacatcatacagaaggtcattaaagcaaaatcaagagccttgccacacaaaagcaacttagtatataaaatagaaaatagaaaatgcaccattcacagcagcattaaaatccaaaatgtaaataagaagagcctgacaagacctttatggaagcaactgtgcaaagttgctgatagactcaggaaataatctcaagtaaatggatctgtataccatattccttgatggggaacagaatatggcaaagatgtaaatgctacttaaattaaatacagagtgagtgccttaactgtcattgccaaagtgacaaccaagctcaggttgctgtgctctgctccccaaatcaaccccggaaaaaatataggagggaaaagattaaaaaaaaaacccatcaaaacagagaaagccctggggatgactgaagactgtgctaaactagtacttgtgttttgggtccagggagcagcagggaaatcgaggaggtctgtaccctgcatagatggcagattacaggatggataggagaaagtgtttaacattccaccccacatcatcgcgcaatctgaggcagcaccacaaaatctgatgccagtagccctggagtaatatcaggacaccaggaaatttgagttgattgagacactatggctccagagttctgctaacaaccacctgaaacaaacttagtaggagaagaccagccttccaaaaaattattattttaatggaatataaagaatgaactaggaatagaatagtaagtatgtgtgaaggccacatactatgagtagatattaataaaatatgtgtgcatatatatagtataaagtctagaaatacaaacgaatatgtagctaaagatatatacatgtaagtaaatataagatataaagatatatatgcgtgtatgtatacatataagcatagatgtatataatgtctaaaacaggtatgtatataaacgtagatataaacaaaatgtacaataccatatataatgtacacatacagtgtaaaatttattaccatgtgaatgagaattaaaatatgaaaatcgctaatctggactctgctgtgttcgataccttcaaaacacatggcttctccaaatctcttgctgctgctcagcctcttccgtgtaaaaataaatcttttaggacaaaaggtttgcaaagtctagctctggctggggaggagcccccatgggatggtgtgcatcttctctcacaggtcctacaatcacaggtgctgcagccccccagggagcatctagcctgggacccgcagccattctctgcaacgcgtgcagctgggcaaatgctcaaaggtgacataaacagatcatctcccacacatcacttcatcaaagagccaggagccaggaggagaaccctcctgagaggggactgaaggtccaacctccccacatagaggggccacagaatccagctcagcccttcctgtcagccctggaagaccctggcaatgttgtcaccctgaccacacccctcccctcactgccacctcatgtgactgggagtcagagacttggtccgagaggagcagacccaatgggcagagaatggggatcgagacccaggcatcaaggtcaggaccccctgagggatgactgagggcccctatccccatccccacccctactccgccagaacccggttcagcccctactggcaacccagggaagctccaggcttgggggccggatgtgacgtcactgacgtgcgcactgggggtcagagagaagggagaggcctccttctgaggggcggcttgataccggtggaggtaagctggccgaggctctgtgaggagtcaaggtgaggtgctgagggaagactgaggatgtccccaccccagatagaggacccgaaagaaccaagtgccgtctctgctcccagccctggaccacccgggggccgatctggg

SEQ ID NO: 44651 - DNA, 2300 bp, Homo sapien
aatggaatataaagaatgaactaggaatagaatagtaagtatgtgtgaaggccacatactatgagtagatattaataaaatatgtgtgcatatatatagtataaagtctagaaatacaaacgaatatgtagctaaagatatatacatgtaagtaaatataagatataaagatatatatgcgtgtatgtatacatataagcatagatgtatataatgtctaaaacaggtatgtatataaacgtagatataaacaaaatgtacaataccatatataatgtacacatacagtgtaaaatttattaccatgtgaatgagaattaaaatatgaaaatcgctaatctggactctgctgtgttcgataccttcaaaacacatggcttctccaaatctcttgctgctgctcagcctcttccgtgtaaaaataaatcttttaggacaaaaggtttgcaaagtctagctctggctggggaggagcccccatgggatggtgtgcatcttctctcacaggtcctacaatcacaggtgctgcagccccccagggagcatctagcctgggacccgcagccattctctgcaacgcgtgcagctgggcaaatgctcaaaggtgacataaacagatcatctcccacacatcacttcatcaaagagccaggagccaggaggagaaccctcctgagaggggactgaaggtccaacctccccacatagaggggccacagaatccagctcagcccttcctgtcagccctggaagaccctggcaatgttgtcaccctgaccacacccctcccctcactgccacctcatgtgactgggagtcagagacttggtccgagaggagcagacccaatgggcagagaatggggatcgagacccaggcatcaaggtcaggaccccctgagggatgactgagggcccctatccccatccccacccctactccgccagaacccggttcagcccctactggcaacccagggaagctccaggcttgggggccggatgtgacgtcactgacgtgcgcactgggggtcagagagaagggagaggcctccttctgaggggcggcttgataccggtggaggtaagctggccgaggctctgtgaggagtcaaggtgaggtgctgagggaagactgaggatgtccccaccccagatagaggacccgaaagaaccaagtgccgtctctgctcccagccctggaccacccgggggccgatctggggctgacttgtgaggctgggccgaccccctccctccgccgctcaagctgctgggcactctggagtgagagcttggtgtgaccagggcagggctggttaggagagggcagggcccaggctctgccgggcatcaaggccaggaccctgagggaggctgggcccccccaacccaaccatgacctacagccccaggttccccagccccatcctcagctccactctacaccccaccccaccccaccccaccccaccccaccccaaactccaccccacccccccaactctcccgcggcagaatctggttccgcccctgttgtcaacccagggaagccccaggtgcccggatgtacggccagtgactcccacactgggggtcagagagtagcgggggcctcgctgtgaggggcgggtcgatatcggtggagggaagcgggcccaggctctgtgaggaggcaaggtgagaccctgagggaggactcaagaccccccgccccagatagaggaccccaaataatacagcgccgcccctgtgccagccctggaccaccccgcggggtcgggcgtatcaggctgggcccaggctctgactggcatcaaggtcagaaccctgagggagggctgaacgcctccacacccctaacccagccaccaccaccatgacctacagcctcaggttccccacctccatcctcaccccccccccactccaccccacccccaagtctcccgtggcagaatccggttcggctcctgctgtcaacccagggaagctccgggtgcccggatgtaaggcctctgacttgcgcactgggggtcagagagtagcaagggcttggttctgagtggtggctgaagatcggcagagggaagcgggcccaggctctgtgaggaggcaagatgagacgctgagggaggactgaggacgcccccaccccagatagagggccccaaataatccagcagcacccctgctgccagccctgaaccaccccgggggcggacttctcaggctgtgggccacccttcgccaccccaccacttaagccccaggggactctgggtcagagcttggtgtgac

SEQ ID NO: 44652 - DNA, 2300 bp, Homo sapien
ataattgtatattcaacacaacagtggactaatgaacaagcagctcgtatgcaaggaataaaaatacagaaaaagcctctgaaatgaattttatcatattttcaaattaacatttttagcaaatgaagattaaaaggcactttaattttctaaaactgacaggaaacatacttgaatgtgaaatgttagaagcattcccattctcgtcaggagcaagtcattgatgtatgctttcactgctaccgttcacagctgcagtgaatgctgaaatgaaaaagagagctatggatatcaagatgaaaaagaggtatgaagattgaaaagaaatagatcatatttttcacaatatgaccatcaagaaaattcaaaggaagagacacatggaacattcaaatgaataagagacttcagaagacagcatacaaagaccactgcagcgaatacaagagacttgtcacagatgagcaacttagaacataaaatgaaaaatataccatccccaacagcatttaaatccaaaatataaagaagaagaagcctaaccaaaatatgcaagacatttacagaagcaactgtacaagtttgctgacagattcagagaaaaaattcccaaataaatggagtagtatatgatgttcactgatgaggaatagaatacagcaaaggtgtaaatcttacttaaattaaataaacagttaatgcctacctgtagctgccaaagtgacaatcaagcccaggctgctgtgctctactcccaaaatcaactgtgtaaaaatatagaagggaaaaagaaaaataaaacaacaatatcagcaacaaagtctaaacaacaaaacatagaaaaccctggggaaaaaactgtgttgaactggtacttgtgttctgggcagttggagaggcagggaggttgaggaggtctgcagccactgcagacgacagggtgagttgcaggaaaagttttaaaggaccaccccacatcaatgtaggatccgagtctgcacctcaaaacacgaagccagtagcccaggggtaatatcaggacaccaggaaaattggattgattgagacaccatggctccagaattctgctaataacaactagaaacaaagagtaggttaggactaccttccaaaatactattattttaatcaaatatatataatgaactagaaatagaatagtatgagtgaatcacacattgtatgagtagatattgtttgataaaataagtacgtatagtcgacatacatatatgtataaatatatgtaaagatatatacacatacattcatataattacacatatataatataaacatatacatacatatgtgtttatgcatataaacataaatataatgcacatatacaattggcatagatttaaaattcgtttcttactatacgaatgcgaattaaattatgaaaatcactaaagtggaataggaattgttaggtaacttcaaaactcaggacttccacaaatttattgcagctactcagtttcttcagtgtaaaaataaatcatttagtacaaaagttttgcaaaatcctcttctagctggggaagagcccccgtgggaaggtgtgcctcttctcccagaggtcactacaatcttaggtgctgcaaacccacagggagaatctggcctgggacccgcagccattctctgcaaggggtgcagctgtgcaaatgctcagaggtgacagaaacagagtatctcctaaaagagccaagagtcaagaagaggaccctcctgagtgaggactgagggtccacccacaccacatagaggggccacataattcagctcagaccctcatgtcagccctgaaagaccccagcagccttgtccccccaccacacccttccccccactgccacctcaggggactcggaatcagaaccttggtctgagggaagcagacaccatcagcagagtacggagctccaggctctgccagatctcaaagtgagaaccttgagggatgactgaaccgctcctccctcatcccccgccccactagaatccggttccgcccctgttgtccacccaggtgagccctgggtggacggatgtgacgccactgacgtggccgcggggatcagagagaagcgagggcctggttctgaggggtcggcttgagatcggctgagggaagcgggctcagggtctgtgaggaggcaaggtgagaccctgagggaggactgaggaggcccccacccctcatataggacccaaaataatctagcgccgcccctgctgccagccctggaccaccagggggcagacttgtc

SEQ ID NO: 44653 - DNA, 2300 bp, Homo sapien
taagggggttgcagtttaatatcaaaatccatactttttaagttctatacttttcatctttcaataaacaatatttcacattttcaaatgctatctttgacacttaagctcttacagtatattattcaaattggtgtcctatgaagatatgtttgagaaagagagaaaagggattacagaaatgctttctactttaccatcattttcttgtttcctggagagttgcttgggcgtgttttgcagaatccatagaggttcagctggcgaatgaaactcgtcaagttgtctgttttgaagatcctctctgcacctttccgttgaagaacctccctctggaagagatccttgtcgatgatcacggcgtctccatcatcgttccagctcacagacttgaatgtgtcttcctccacaatcgtccaaagctttcttgggaaggagagcctaaaaaggttgtggttgtcttccacgttgaccacgcgttggtttcggtcttctggtggtgagttatcttgggagcctggatcttggctcatggcttggtcctcgtgcctgtccaaaacctcgctggaatctggatttggatcaggtgaagaaccagatgggcccccgcttgttggctctccaccaacagatggggccagcttggcttcatattcctgttcagtgttctgactcgccatggagctacaccagaatcaggagcattttgtacccaaggcccttatcactgtcctagcaagtccaaaatgccttcagtcagagtaggcgtgcccaataaatactgtccacaaaattctagagtctcggtatcagggcaaccagtggcttaactcatcatctgctgtatttgtcgcatgatgtcacaaaggtggctctcagccaatctggagagggggccctggccaggtgttgggggagtagacaggtggcatggccttcagcttctccctcttctaaaagtataaacaggcatggttcaagttcccagaaaagtctcccatcttctgacagtcacattgtgtcaaagggccaggccccagatgagctgagaaaccatggctctatggccactcccaaccctgaagacaggggaggccatttgctggcctctaatttgctcaagagccagcccctagttatccctagcttgggtttcaccaagactgcctgactcagatggacccctcatgggtgactgccttctaggagatggtggtccctaccaggctgtttggcctgatctgtgtggtagcacccctcttttccaatccccccatctccttcctgctttggtctcttccaggtactcctaatgattggttgcatgtgctccagtgggcccagataaagtgtttcttattccccttggtcaagttgtccccagagtggtgctgtgcctgagcatggtgggagcactcccctcactcgtctaccactgtgttacccagagcatcatttgtggttggatggccacatcctcagctgtgctttggagtctcctgtggagctctgcttgcccttgcatctcaccctcttgcagatcacaacaggagattacctttagtttcatttttgcccataaatactgttttcattgcccaagacatgttcatttctgaggcctgctttacacagactagcctaagaaaagtttctgcttgtctagttagacctgactaaagtaatccagcacaaaagttccatcattatgtatttgaaaacagatgagcgtatgagtgtgtgttgcggtgggcaggaggagggagaaaacccaaatgaaagccatgttcaaccccagatgagaggatacaacagtctttctggtgatacattttctctagccattaaagacaactttgttcttaatattcactctgtatagggagacagagtgatacagtggaaaggcaccagactgaaaggaccctgggtccttgtcccactgagtagcaccctttgcccactcagggtcggccctgagtgcgaagagggttggaagaggctcttccaaggtgcttttcaatctcagggctctctaatccttcatggtgcccccaatgcctggatgcaggcttggttcatggtcaccaagctttttaaacaggtttacaaaggttttgttcaaggactcagtgtaacctgtagacacacacactctgaggctaaatattaaaatagaggccattggtgagatctctaaatgaggatccttgagtattcagttagacagctggtatctttcacttacataccaaagtgctttttcataggggaattcttaagactgagaatgacatttt

SEQ ID NO: 44654 - DNA, 2300 bp, Homo sapien
gctggggtgggaaaccagatcaggagggaccttgagtgccctgagaggaagtgtggattctgtgctagttggggcagggagcccttgaaaggtttcagtagaggagtgacataatctcattgtccctgtaccaagatcattccgatggcagtgtggtcacaagagtgcagaggacaagtgctgggggggggtgggggtgctatcaggagacttcttcagaaggcagggggttttaggggattggattgggattgtggccatagagattatggaaagggatcagattcagtgtcggttttggacacagtgccacgggatgtgggccgcagatgtgggaaagaaaggcagtgcagagagcagctaggtctggggcaggaacactgtagctggtgatgccactcacagaggtggaagggaggtggacttggtggtgatggttggggtcctgagtatgtatgggcctgtccacctaaggctgagtctgaaggggggtggcctgcaccacgggattcagagcaggacggtgagcaacatgggggtcccagaagaagggaaggagtgtgcccagccatgctggggctgctgagcatggactaagatgaagacaggactggcatgaggccggccatgggtgcttgtggggataggtcagtcagtggagtgggtggtggggggggtggggaataaagggagaaaggtgggggtgggggcagaaggttcagagaggaagtagagactgcgcatgtagacagctcttctgaggtctcggctgttcagggttgtagagaagggaggcagagtgggaggcgcgcgtgtgctcagagtagggatgctgagcgagcatagatggtggctggtggcacccagggcccggagtgagccagaggagcagggtccagagcacagcaggcaaccggctcagctgaggcagctcaccccagaggcgggagaaaagcaggagatctggagctcagaaggctgcagtgcagactgggaaaggagtgaataccaggcagctttggccctatcagggctttgtctcatgagggtgggtatattttcttaaaatcatagagcgtactagaggttgcgtttatgtgttgaaaggaaggacagagagaggagtaggggcagctcaagggtggagttcagggccagggggcggggccacgggcctgaggggtgagggcggccactatttctgactgttctgttaggtgccacgtactgggctgggtgctcttggtgccttatctcccttcctcacagccatgtggaaactgaggcatctcaagagtctatgactgggctgaggttctggtttcaagcccagggttccttccaaggcacagggctgtcctccgtgcaagaggaggggaccctctcccaagccacacacgcaggaggctgggcaagagttgtgggaagtcagagcccgtgtgactgtgggctggtgcctcattctcctcagccatagagtgggcctcacagtaccactgaccctgctgggttacttgaagattcaatttgatgatctgaagatcatgccatcccagaggctggcacgtggaaggcatgtgtggggggttgccagttgttctgattatcattcttcttttctcagctcagattgggacaggggcgtctgctgacagtggagagcagtggtgggggaaggggcttgaggaaggtggcacccagaggggtggagaggagatgtctgactgagggccatctgaggtcacggtgcatcctgaggacagagctgagattggatatcaacgatgtgggctcagcagccctggagtaggagctgggaaggtcagtgccttggtggcggcagggccagggcactgagagtattggcagggcacagcaggggaaagggaagagaagcagagcgtgggactgtccctctgtgctggaagagggctaacaccagccccgactctccgctctggctaggccgagggggccctctgtcctctgtgttgccctagggctcggtgacctctgtcatagcactgaccacatgctatcctgcctgtgccttcctctagctgtccccgccctactccggaccgccccaaagactccatgggatggacctgagtcagccgaatcctagccccttcccttgggcctgctgtggtgctcgacatcagtgacagacggaagcagcagaccatcaaggtcagtgcgatttaggccacctgagagacacggggggaaggtcaggccactgcccatgagcttgaagggctggcgtgtgatgcgcttctgtgcttccgcaggctacg

SEQ ID NO: 44655 - DNA, 2300 bp, Homo sapien
catctatgctcgctcagcatccctactctgagcacacgcgcgcctcccactctgcctcccttctctacaaccctgaacagccgagacctcagaagagctgtctacatgcgcagtctctacttcctctctgaaccttctgcccccacccccacctttctccctttattccccaccccccccaccacccactccactgactgacctatccccacaagcacccatggccggcctcatgccagtcctgtcttcatcttagtccatgctcagcagccccagcatggctgggcacactccttcccttcttctgggacccccatgttgctcaccgtcctgctctgaatcccgtggtgcaggccaccccccttcagactcagccttaggtggacaggcccatacatactcaggaccccaaccatcaccaccaagtccacctcccttccacctctgtgagtggcatcaccagctacagtgttcctgccccagacctagctgctctctgcactgcctttctttcccacatctgcggcccacatcccgtggcactgtgtccaaaaccgacactgaatctgatccctttccataatctctatggccacaatcccaatccaatcccctaaaaccccctgccttctgaagaagtctcctgatagcacccccacccccccccagcacttgtcctctgcactcttgtgaccacactgccatcggaatgatcttggtacagggacaatgagattatgtcactcctctactgaaacctttcaagggctccctgccccaactagcacagaatccacacttcctctcagggcactcaaggtccctcctgatctggtttcccaccccagccacgtcctctcctctcccctttattcaccaccctgaagccacacaggccttccatcccctgagggaacatgccaagcttgtttctacctcagagcctttgtcagttgtgatgggttgcattgtgtcctcttaaaatgcgtatgttgaagtcctaaaccccagcacctcaaaatgtggccttatatataaaaacagagtcattacagaggcaatcaagtgagactgaagccatcagggcggacccgcatccaatgtggctggcgtccttatgaaaagggggatttgagagacagtcacgcacacagggagaacaccatgagaagataaacgcagagataagggagatgcttctacaagctaatgagtgccaaagattgccggccagccgcctgcagctaagagaaagggacagaccagattgtctttcacagcccacagaacaaacgaacctggccaccactttgatttcagacttccatcctccagaactgcgagacaatgattgtctgttctttaagccagcccctttatggtcctttgtttcagccatcttggcaaactgctgttcccaacacatctgcacaggctagggcacgagtttgccatttgacagcacatcaagcccattctttccacctgacaatcttcatctaccttgtttttcactgcctgggtgatatcccattgttggtcgtctcataatttgcctgaccattcctccactgatggagagttacaagttgcttcccacttttgccactagaaatgacattacttctaacactcgctgtgtgaagacatgctgaaggaaatgcctcggccgcctggcacgcccatctaagatgctgatatctgccagcaaatgactttccacaaagactcacccgtgtaccctccaccaacccatccatggtgccatttcctcacacacttgtggcccctgagcatgattattcttctgatgagtgaccaaagataaccaggttccttggttctggattacttctgacggaggctgaatgtcccccacagggcctggccacttccatcgggataaatggctacagtgaatgtttgcctcttttctgccgcccagtttcttagccaacccttttctcgtcatcaccacaaaatcacaacaactgtgtgtgtgtggaatccctagtaggaactgatgtaactgaaaaggcaagaagggggttgagtcccctcctacctggtgctgcagagagtacctgctttacggccagaggaggaaacactcttccacttggtttctttacctgcacaacaaggaagataaagaggaaaggtcattaaatgcaagtcagcaaagctggttaatggccctaggaaggtcttctactcagcaggcattggaaaccaagagctgggagggccggtcctaagagtaacacatgtgcacctcactcacggtttggttctgctaa

SEQ ID NO: 44656 - DNA, 2300 bp, Homo sapien
cctagcttttcctcctgcaagtccgtccccaacttctcctcttgcagctccgcccacagctccaccccagctgttctgcccccctgctcctcctccctcagctccgccccagctgttcctcccacagttccgccccccagctcctcctcccgcagctccgccccagctattccgacgccagcccctgctccacccggcacttaaccatttccgcccacagctctttcccacaactacgccctcctcttgcaggcggctcctccagaagctctgacccagtccccgctgcagccacagccccagcttcttacccccagctcctcctcccacagctctttcccactgccccgccctgctaccccttcatcaccgctcccagctccgcctcctctagccccgtctcgcttctcctacccctctgcccaccccaacaacctttcagctctttcctccagctctgcactagctcctcccccgcaattctcacccgccagccttggtgcagcttggctcctccttctccagctctttcccgcagccccgccccatctgctcccacagcgctttgccacagcctcgccctgctcctcctccaggaacgcccggctttccctcagctccaccctgcagctgagctgtgcaccaggccctcccacagagctttctcgtgattccaccctacacctccccaagccgccgctcccctaagctggttctcaggagtccgcggagtcctcccgcagctgttcctcgctcaattgcccactgccccggcctgctcctcacaccactgatggcaaagccccgaccccagaccctccccagtggtttctctcggcccggccctaccccgcccctccaacgcctgcttccaaggccccgcccccagcccatcctcagcggtttctctcagctccgccccgccccagccccacccggctcctcctgcggctggttaaaaggccccgcccccagccgctccccaatggcttcgctcagacccgccctgccccgaacccccccctgcttctcccgcggctgcctccgaagccccgccccgcgccgagccccgcctctccccatctcctccctgtttctcccgcgggtgcttccaaagccccgcccccagcacccccctcagcggtctctctcagcccgatccaacccttttctgagccccgccctgtttctcctgtggctgcgtgcaaaccccaccccccagccccaccccagaggttcccctcggccctgccccgcccccccagccccgcttctccaaaggctgttttcaaagccccgcccccgagcccctccccggcggttccctcagccccgccccacccctccccgagccccagccccccccgaaccccgccccgccccactcctcccccagccctgccctgcttctccagcaccagcttccaaagccccgcccccaacccctccccactggtttctttcagccccaccttcctcctctcaccagccccctccctccccgcgctggttctcaggagtccgcgagctcctcctgcagcctctcctcgcccagatcgcccatagccccgcccccaatggtttctctcagccccgccccaccccctcgagtccccgccccatcccaagtccccgccccatcccctcaagtccccgccccactctcaaccccgccccagcggtttcctcactcccgcccttcccctcccccagctccgccctcctcctctcagccccgcccccatcccctccccattggtttctcccagttccttcctgctggtctcgcagctctgggcttaaaaatcctgcctggtggtctcgtcccgcccctcctcttcctccctccggttccttttcctccttccggttcttggtctaggctgcctgtctcgagctccccggccttgtcctggttggctggcgcgggacaggatccggtaaactgaacagcgtctccttgtggcaagtgcgtgcgtacgtgcgtggcgacgtcactgcgtggcttcgtgaatacgtggcttcctagcgatttggcggtgtataggcgtggctgaatacgggcctcctgcgtacgtgcgtggtgtacgtacgtgcgtgattacgcgcacacgtacgttcctcatgaaagggacgacgggagctgcatgaaagccgaagttatggaccgctagcatctgtcactggccaccggtttccgggagtaagcggcagctaccttacagccctgacacgagccgggtgctctctcttctcaccgcggcccacgtctcctcgctggctccggtggcctcgctggg

SEQ ID NO: 44657 - DNA, 2300 bp, Homo sapien
ccgccaaatcgctaggaagccacgtattcacgaagccacgcagtgacgtcgccacgcacgtacgcacgcacttgccacaaggagacgctgttcagtttaccggatcctgtcccgcgccagccaaccaggacaaggccggggagctcgagacaggcagcctagaccaagaaccggaaggaggaaaaggaaccggagggaggaagaggaggggcgggacgagaccaccaggcaggatttttaagcccagagctgcgagaccagcaggaaggaactgggagaaaccaatggggaggggatgggggcggggctgagaggaggagggcggagctgggggaggggaagggcgggagtgaggaaaccgctggggcggggttgagagtggggcggggacttgaggggatggggcggggacttgggatggggcggggactcgagggggtggggcggggctgagagaaaccattgggggcggggctatgggcgatctgggcgaggagaggctgcaggaggagctcgcggactcctgagaaccagcgcggggagggagggggctggtgagaggaggaaggtggggctgaaagaaaccagtggggaggggttgggggcggggctttggaagctggtgctggagaagcagggcagggctgggggaggagtggggcggggcggggttcggggggggctggggctcggggaggggtggggcggggctgagggaaccgccggggaggggctcgggggcggggctttgaaaacagcctttggagaagcggggctgggggggcggggcagggccgaggggaacctctggggtggggctggggggtggggtttgcacgcagccacaggagaaacagggcggggctcagaaaagggttggatcgggctgagagagaccgctgaggggggtgctgggggcggggctttggaagcacccgcgggagaaacagggaggagatggggagaggcggggctcggcgcggggcggggcttcggaggcagccgcgggagaagcaggggggggttcggggcagggcgggtctgagcgaagccattggggagcggctgggggcggggccttttaaccagccgcaggaggagccgggtggggctggggcggggcggagctgagagaaaccgctgaggatgggctgggggcggggccttggaagcaggcgttggaggggcggggtagggccgggccgagagaaaccactggggagggtctggggtcggggctttgccatcagtggtgtgaggagcaggccggggcagtgggcaattgagcgaggaacagctgcgggaggactccgcggactcctgagaaccagcttaggggagcggcggcttggggaggtgtagggtggaatcacgagaaagctctgtgggagggcctggtgcacagctcagctgcagggtggagctgagggaaagccgggcgttcctggaggaggagcagggcgaggctgtggcaaagcgctgtgggagcagatggggcggggctgcgggaaagagctggagaaggaggagccaagctgcaccaaggctggcgggtgagaattgcgggggaggagctagtgcagagctggaggaaagagctgaaaggttgttggggtgggcagaggggtaggagaagcgagacggggctagaggaggcggagctgggagcggtgatgaaggggtagcagggcggggcagtgggaaagagctgtgggaggaggagctgggggtaagaagctggggctgtggctgcagcggggactgggtcagagcttctggaggagccgcctgcaagaggagggcgtagttgtgggaaagagctgtgggcggaaatggttaagtgccgggtggagcaggggctggcgtcggaatagctggggcggagctgcgggaggaggagctggggggcggaactgtgggaggaacagctggggcggagctgagggaggaggagcaggggggcagaacagctggggtggagctgtgggcggagctgcaagaggagaagttggggacggacttgcaggaggaaaagctaggggtggagctgtgggtggagttgggggagggagctgaggcccttctgtgatgcacccttaggcaagagtccaaactttcccgcggcgacctaactgcacctccagtgtcttcccccagagggcacagaagcagcaagaagggcgggaacacttgactggggtccatgcagctctaggctgagtcttgcagggctgagccccccaggcctgctctcctgtgtcctggccgctccgtcagtgcctgccagtggggtccagagg

SEQ ID NO: 44658 - DNA, 2300 bp, Homo sapien
ctttgaccctgattcatggtttcccttcagatgctttttggtcagcctgctttcctcgtctaggaaatggcttttgcccatttttctttttctttctttctttttcatttttttttagacggagttttgctcttgttgcccaggctggtgcaatctcggctcaccactacctctgccttctgggctcaagcgattctccttcctcagcctcctgagtgctgggattacaggtatgcgccaccatgcctggctaagtttgtatttttagtagagatggggtttctccttgttggttggactggtctcgaacttcgacctcaggtgatccacccgcctcggcctcccaaagtgctggggttacaggcgtaagccaccgtgcctggcttgcccatttttctattgagtcatttgccttgttggtatggagttgtaggagctctttctgaattctgcctctaaccccatgttggctttttgtatttcagagacctcgtccgcacaggggcttgttcttctgtgtctttgcagggctgttttggactcagtattcacctaagcactccaaattgtaagtaaccccagagatcatggagtgtcccactgcccctccatctgaaggctgtgacctctcccccaaggaggaggtgctcgcatgcgtccagtgccctgcccattagattagggagggttcccttttttgctctcttgcactcatttgtccgccttttagctttccttttctgccctgactctcacagggtcgtgcggatgtgcgatgtaggaggaggagagaggtaaagtggaggaataggagctggaggggaggaggagagaagaaaagaggagaaggagggggaagagagggagcgggttcaaggagggaaggaggaggagaaggagaggaggaggagatgagaccaaggagaagaggtgaaggaggagaggaggacacagaaaagagaagaaagaggagaggagacggagaagaggaggaggagtaacaaaggaggaagaagaggaagaggactagaagagcaagtaaggaggaggaggggggagtaggaggagaggagaaggacagaaggggaaggagaggcagatgtggaggagaggaggtggaggacaggaggggatgagaaagaggaggagaaaaggagaggagagggatgaggggggaggaggaagagaaaagaacaggaggagaagaggaggagaaaaggaggaggagtgaaagaaaagaggagaaggagaggagggggggaggacggggaggaagggagaaggagagaaataggaggagggaggaaaggaggagaggacgagaggaggagcagaggaggaggaggagaggaaggggaggagatttggaggaagaggggaggtggaagaagaaaggagaaggcggagaagaggagaaagcagagaggaggaggctgaagaaaggaggaccaggaggagaggacgaggaggaaaggaggaagaggaagagtggaataagaggagcagaggaaaaggaggagggggttggggaggagtggagaggagaggaggaggaacagagttggaggaggtgaaagagaaaagaggagaaggaggagaggaagagagaaggaaatgagaaggagaaaagtaggaagaagaagagagaagaggagaggatgaggaggaggagaggagaaggagagcaggaggtgggaggaggaggagagtaagaggaggaaatgaggaggaagaaaggaggacagaaggtggagaggaggaggagaggaggagaaggaaacgaggaggaggacgaggctgcaccacccttatcaggttccagttctcggtgcgccccgttctgcaagacactctcctgtggtcagccctggtctgcagaggattcccgcgctggatctctgaaggatgctggcgccctctctgcagcacattcctgatgcccttgctgacacgtgtcctctgggccctctcctgaaacctgattctccggggtgtcttctggcctcacctcttctgtccagttccagcaagctcactttgcttagcctttgaatcccttccttcactgtctgccatgacagttcaggcctttcaccgtcactcaggcctggaccatcactgttgcccatcccatgccatcaacaggtttgccccatcccttcggctccctaccagggcattcagttgtgttgagcagcagagtgtctccaagtccccactggttgagctgcatccgggtcccatcccacagggaccccctggccgctgcagatgcatgctgatcctgcagctcctcgagg

SEQ ID NO: 44659 - DNA, 2300 bp, Homo sapien
aggacagaaggtggagaggaggaggagaggaggagaaggaaacgaggaggaggacgaggctgcaccacccttatcaggttccagttctcggtgcgccccgttctgcaagacactctcctgtggtcagccctggtctgcagaggattcccgcgctggatctctgaaggatgctggcgccctctctgcagcacattcctgatgcccttgctgacacgtgtcctctgggccctctcctgaaacctgattctccggggtgtcttctggcctcacctcttctgtccagttccagcaagctcactttgcttagcctttgaatcccttccttcactgtctgccatgacagttcaggcctttcaccgtcactcaggcctggaccatcactgttgcccatcccatgccatcaacaggtttgccccatcccttcggctccctaccagggcattcagttgtgttgagcagcagagtgtctccaagtccccactggttgagctgcatccgggtcccatcccacagggaccccctggccgctgcagatgcatgctgatcctgcagctcctcgagggtgtcatcgctttcccccttcccagacccagcacaccctgcctgcatggcgctgcgctgcaccttcactctggtcacgggtctggcagtcagctcaccaattcctcctgcttccctgggacttgccggcttttagcactgcaattcactcagcaaactgggactgttggtcaccctacctggcagccagtgataaggtgagggccactcctgggagggaggacacctgtggggaaaattcttgtgttatttatttctccttcgggatagggtgcctgcagcgcttcatgggagggggtgggctgatgctgcgggctcagaagtttcaagggcatctggggagaccagatattcagagaccttctagatgtgcctgttccatgtatcagggacgcaggttttcccaacagggctggtgtcattggcatgacagacctgccttggctgagcgttcacctgtctttggagttcagccaccttagcaagtcctgggtttgttcttcagactttgctgctcgcccattgcctggatcgggggctactttgtaaaccaccaggaagactccagtgtttctggttaatttttagatgtttgttaattgctcttggtctctcattaatcccctgtgggtcatccaggaaacatactcaccactgtctgttctctgagttttcatttccaggcatccgccctgcctggatctcctcacctgccaggaacttcctctccacaagccggccatcccagcaaaagttctaacaccaaaggtctggcaactagcctgccatcttgtgcctggagccgcctgcgtgccacctactcccgaagatgggaaccttgttgccagttgggcagatgcggggcaatcctgtaccaagaccccattttaccacctgctttctcagaccactctggaacccactgtctcagattgtgtcctccaggaagcagaccatgagagggagttggcagggccaaagatttactggggctaactaacactcaggaaagggataggaaggaaacagggctggagagcaggttgagcccgacctgacagtctcgagcagcccaacagggaggtgtggagcaagggttgcccactagaggggcctgcattgggtacgggtgatggggtccacatggtacctggcatatagcaggctgtgcaatccatattaactgactggataaattaatgcccagaaaaggtgccctggagaatgggtgtgtgctgaacacaatagggaagggcccagcatctgccttggcataggcagaactgtgctgtgccctgcaacaggccacctgagagctgctttgatcttgtgtgtacattagatgactgccaggggcatgaaggggatgtgcttccagggcatttgctggcagggcgtctcgtgatctcttggtattggtgtgagcacagcctggcaggagagggcagatctccatgcaaagtatgtcagaaagcagatggaagccaggccccctcctgaaagaggctccttgaaggtaggtgcacactcatgtctttgttacttgtaagggggcatcttacaggcaagaggagttaggtgaatgtgaagaggaaggaactactctgggcagggggctgggggacgcttcgtagaggagggggtgtttgagctgggccttgaaggtcaaaagggttttgttaggtgggaaatgggggaaggacagtctgaaagggttaggtacattcaaggagcccaga

SEQ ID NO: 44660 - DNA, 2300 bp, Homo sapien
ctaaggcaatgtccctatcttacttcataggtcaagagtatccccagggccacccagcaatgcctaggaatgaactcctagaatgaaaaacactttgggagattcttctatcaaccttcccttgttctataaatgtggacactcaggcctgaaagaggggacaggccctgcaacttgagatggctcagcaggactgggactcaggtctagctcgtactctccaccccaggcctagatacttgtccactgtgactacctccgggagccaggtgccagcctgggaggagccatatctgttttggagcaattgccccgggcatagcaaagaagggggttgagtatgagatagtataaggatggcatgtatcctttggtaaacaacaaatcttggggctggaaggctggtcaaaagtcagtctggagactggttttccacaacagaacgtgctgcgaaagagttgtgggcaaaactcggttttgaaaattgaatctttaacccccctgggtgccatctattgcaatcttatgagaactacttttgtgaagcaaagggtcttcttgtaatgcaaatttccactccctaattggcccggtgtgtaacttctatgccttcaattgctgaagggggccaagcccctttgacaccggtttttgttttggtttagcacaaagcaggtaggaggtagggtcaactcgcacctccctaatgctgccgctgctgcctccgggcgggagaagacccacctgggctccagggcagagctgggccagcttatcacctccccttcatcgccctgtggaggtctgctgcagagtagttaatcgggaagctgggagtgcaggtggcactctgtgccacctggagccatctccgagagagtgcccgcatcctccaaggctggagaggaataccaattgcacggttactgggccccctcaggagcccacaagaggaaattaaaaggcatacacacgcctggaataaaggaccctcttcttgcagctaatcactgaaattggtcactgggttgtcccctcccccctttggtgaaagacatggtctttctcttgttctgttccatcactgcgttcttagaaaagtgtgaggaggggggctaagctttgcacgggcatcctcccatccccgccctcaaggtctgcctttctctcagagtcctggcttttcccagcatggggggcatttgtttgtcctgtctgatgcaggagaaaggtcaatcccagcccctaggctatgcaggtgggaagagtggcctggcatctcttaagactgtctcctgcatggccctttgcaggttgtaaaatgcttgcactcccctccctgtatgggcttcacaacctcatcagggctcacagctgctattttaccttgagggcatggtctaaggtgacagacatggtcctcaggatttgaatccaggactttagctccaaggctaggataagctcttcccaccctctgtgctttagggcccactgtggccccagtccactcggcaatgggagagcctgtttgcatgcccttagcaaagcctgtggagccctgagggcaggggcaggaagatggccttggggctgccagggagatgcctaggaggttttggttattaattaattaataacactgtgtcccagcagtcaggctgggctggacctatgggagatgccctctagatacctgctgaaagcaagcaggaaagagcatgagacttactgtctcctgcgtgggaacagggggcggtgcttagtttcccctgctaggccagtaaaaggcttgggtcacctgattgccaaggccctgtgccacaagttctggagacctgatacaagctgtggtcttgcttcccactgtggccataggcacgtagctccatgagtgttctgaagaggctcagctcagggaaaatgcaggtggctgggcctgagaatctggggttgacaagaaaacctaatattcatactgtagtatattgaatggtggccccacaaagatatgtctacctggcacctgtgaatatgaccttatttggcaaaaggtctttgcagatgtaattaaggatcttgagataccatcccagattatccaaataggcactaaatccaatgacgtgtcattataagagagtggcaggagattcaagatacacagggaagtaggtaagggtgaagatggagccagaggttggagtgatacggccacaagccaaaggaacacctggatccaccagaagctggaagaagcaaggaaggattatcccctagagccttcgcagggagcttgg

SEQ ID NO: 44661 - DNA, 2300 bp, Homo sapien
acccatccaggcctggcgccttctgtttggaaaggttattaactattgattcaatttctttaatagatacaggtttgttttgattgtatatttctgcttgtgtgaggtttggcagattgtgtctttcaagaaattggctcattttatctaggttatcaaactggtgagcctagggttgttcacagtattattttattatgctttgaatgtccatggggtctgtaatgatgtccccactttcatttataatattaataggtcatgttctctttttttccttagctttgtccagaggcttatcaactttattgatctttttaataaactagcttttggtttcaatgatttttctctattgatttcctgtttttaatttctgctctaatttgtattatatattttattctgcttacttagggtttaatgtgcttttttttttcttttttcttttttgagactgggtctcagtttttgcccaggctggagtgcaatggtgcgatcatagctcactgtaatctcaaacttgtgcactcaagcaatcctcccacctcagcctcctgagtagttgggactacaggcatgcaccaccatacctggctaattttttttttttttttttttttttttttgtggaggcttgtcttgctatgctgcccacactggtcttgaactcctgacctcaagtgatcttcccagctcaacctcccaaagtgatgggattacaggtgtgagccaccatgcctacctagcctcttcttttctaatatttacattcaaagctataaatttcttctttatcactgattttgctgcagtacacaaagtttgataagttgtgttttcattttcttcaaaatatattttcaacttctcctgagatttttgacccatgtgttatttagaaatgtgttgtttaatctccatgagttttggcgttttcccattatctttctattcttgatctctagtttaattccatcgtggtctgagagcagacattgtatgaattctgttcttctaaatttggaaaagtttattttatggcccagaatgagatccatcttggtgaatgttccatatgagcttaagaagtatgtgtatctactgttgtttggtaaatgtcagttatatccagtcgatggtgttggtgttgagctcagctacgtcctacctgtgtggggtttttatttctttgttttgttttttgttgtttttcttttgcctgtgcctgttgacagttccatgttggaagcttctgtagtgtcctgtccagaatatatgggagtcaatatggaaacctatggaactcattgctatgttatttcccaagtctaggactctaggttggtcaccttttctttctactttctagaggctttttatgcttttttattatgttatgcccagatttttgtttgtttctgtagtttgctttttaaaacactttaaattgtggtaaaatgcatatgacataaaatttactatcttaatcatttgcaagtgtatagttcagtattgttaagtatattcacattgtcgtgcaatgtctccaggtttgtttagttgtaaggagagagacatgggagaagtaaggctacttcatattggtcagaaccagaagtgacctatagtatgttttcctggctcttcttttatgttttatttttttccatatggaatttagtatcaaattgtctagcaaaattaaaaaacttgttggtattttaaaaattgagatttcatcttatatgtataaattgttaaacagaactgacatctttatgatgttgagtcctcctattcaagagcaaggtgtgtctttccattcattcatgtctacttttgcatctttcaggagtgttttagaatgtcctttgtagaggttttgtacactgcatgtcacgtttatttctaaggatgattttttttgtagataaggttttatttcctattgtgtattcccctttcatggttgtttgggaatatggaataaactagtgactttcaaatctggatcttagccctatcacctgagcccagacccagatttgtgacagttcatcccacctacccatttagctagtcctctcataccttcaactcaatgtgtgcaaaggtcaacttgtgttcttccctgatcactccaaccctcacttggacactcaccagacactgaatttatttctgactcatccctctacacccccttaccagctaattggtcattcagtcctaataattctctagcattctggaagctatggtcatgaaatctatgtgttagatggaaccatcaagtc

SEQ ID NO: 44662 - DNA, 2300 bp, Homo sapien
tcttctctctgttgttcagattgatcatttctttttattttattttattttattttattttattattattatactttaagttttagggtacatgtgcacaatgtgcaggttagttacatatgtatacatgtgccatgctggtgtgctgcacccattaactcgtcatttagcattaggtatatctcctaatgctatccctcctccctcccccctccccccaccccacaacagtccccagagtgtgatgtttctattgttctatcttaattctttcctctgttcttaccattatcctcttgatttgattcactgaatttatttccattattgtatttttcatttctaaaatttccatttggttcttttttatatgttctgtttctctgctgagaattctgattactttgctgagactttctatatttttttcatttgcttccaagcatggttgtaattgttggttgaagcactttaatgattacttctttaaaatccttgtcaggcagttctgacatctgtgtcatcttgctgttggcatctgccgataatattttccattccatttgatatcttactggttcttggtctgacaagtgctttgctactgaaacttgggcattttggatattgcattataagactggatcttatttaaattttctgttttagctgacttcctctgacactgctctggcagggaaggcgggcaccatcttattcttcattgacatcagggaggatggagctcctcattactgctggacaggggtgaggattccaactccctactaggcttttactgatactactctagtgcggatagggaagggcacctcattactgctatgtgggggtggagtctaggctcctcatttggcttttgttgatggaatataatgggactgcattttcttctatggtgtttggctggagtagagcagttattgtctaaaagttttctgtcttgctaggttacctctttcctggtcttttggctagaaagagcaggcttttgttggggcttctttgttagtgcccattggcattctgggtttctggcttcttcagctccaagtctggtatatatgaggcagaaacaaaatccagagaactcgccactgcatcattgctcaggtcccaaggtccctaaccagtatacttttttctttccaccttttaatgtcttattatgtttgttttatatataatgcccagaggttttagtgatactcagtgagagaatggggaaaagtacttctccatatttccagaggcagaggtttagacttgagattttagaggctgatgctgtactgccaaggaggtttatgggaagtagagctgtccttatatattaatgtcttagtggagctcttatttcatgtctacatcatgaaaaacaaaaagaaatgaaactttacctgggtttgcatatgtctgcttatctgtcactggaggagtagccatgatcataacctgctcagtcagtttcctttacatcagtgcaccagggtttcatgagccccctttcaatatctgttgctcccttcctgtgtctgtcaggctttgaactgttagctcacttggctgtatcctaacagtgccacagtgggtgtctgcttcttctatgaaccataaagcttactctagtagagctgagaaggccctaagccatcacctaattgagccaccatgtttgcatataaggaaattgcatctcagagaacagaggaagttttcctgaatctcactgcatatcacacaaaagcaaatccagacgtaggacccagatatcatacttgtaggcccagtgttattttagtcacatgaagctgctcctccatccacccctctaccttccagtgaactttgtcctttcctctggtcaaggactgtcattttatcccagccaactgtctcacaaaaatgcccctcattcttgggggtgggggtgctcaatgagggtggtgggtgggaggaagggaaaaggaatgtggttgactccacacaaacctgtcttcagagtgaaagtctgtgattcacggggtcagtggtctcatcttcatatctgaaagacagtgtactttttgtctccctaagccctgtgtctaggtcgtttgggaaacgccttggagagtcaagaataaatttgcaggtcaaacaatggatgactggaaaagtcggcttgtaatcaagagcatgcttccccatttcgccatggtgggaaatcgtcaggagcccagaaagctccaggaatcggtcagacaatgggccatggggggaggggggtatttaatgct

SEQ ID NO: 44663 - DNA, 2300 bp, Homo sapien
tcatggagcagtgtctgctggaaaaggagacaggagttccctagcatggaggggtagataatctccccgctccctcccctcttctgtcctcccttccccttctccctcctcctctaccctcccctttttcctctcccctccccttcctcctcctcctcttccttctcttcctcttctttattctctctccctctcagtctccccttccctcccttccttcctcccttcctccacattctttataaaacaaggctttggatccattcactgccatcccccagaagtcttgtcatttgaattcttgtctgagtcaggatgctctcctccaagggctcatagggcaaggaacttcagcccgaatccggctaaaatccaggaacattttgtgggcatctgtctcagtccccgaatcgtttgtcctctgcctttcccccgttggagtccttttgcctgcttaagtggttgaattggtaatgagatcattcttcccatgcagtggtgagaaagcagcactcaggtgattgcacctgggtaaacaggagacattagcatgtggtagctggtgagtgaagctggtgcagtgcctggcgtgggctcagttgtgccagcaggcagtggtggagtttgggctctttcccctctctcctgcccagcacacaacccccagggacaggtgggggctttacagctccctggcgtcagcctaaagcttctagaaaggcatccccaggacttccaaggttgccatcttggctgagactgtctgtgaatgtggtcccttgtctgacagtgggggctgggaggggtgtgacagaggaagagctgggccttagttctctgggggtcaccatgagagaagcacacctgggcttgcatagaactcagtgctgcttgtcagtgtcacctggcacaacaggacgtagtgccacagttgcagccctagaaaatttgacgaccccttcatagctttgtttataaaaggccacacggcctaggctgtccttcataagagagcagaaagcgagtgtcccagtcactaagcagcaactttcaggcacggtttcctcctggtcactgaaaccatttgccatttcctgttttctccattttccaacgattctaattgtcagtgtcaaaaggcaacaactgttttcttggggcttatctttggagcacattgattcagaacaaaggatgggagcctccatctgcaaaacaaaggaagcagcctcctcgggaggcctggagagaatgctctggctcctttggccagggacagcaggaccagcataggagcagaggactggcggtgcctctggacactgccgtaaggtgaagagcccatggaggaccgtcgcttgctggtggcaccccagacttgaagatcctgcagagctggccaccggcacccaggctgggtgtcagcagcgctgtgtggccttggcagtttccatagtgataggctggccagcttttccattagactccggggtcctctggaatgtgtgcttcccgggatgaagacgccccagcacccgctgaagcctgccctgccccggcgtggcctttccttttgtctggcacgcccctgggcttggctttctctttccgtccctcccttcggactttaccgcacttcccctgctgtttccttagtcacactctccagcctccatctgcccctgcccctgaacccctacctctgtacaactgtgttatttgatgaaactaatgcagcaaccggtggggatggagttaaggaccgtttagacctagccagccacgcaggaatctgtccccagaagcagcagaagcacctggtctgcagttaggagatactgtacttcttagccgtgtcaccttgggcaagtcatttaacctctctgagcctctgctgtcacatcagtaagctggggactgtagatcttctgccctgatgtcctgagactggtacaagaagagccaaagcgaaaggactgccttcagaaatggctgccaaccctgaccatctcaggcagatccggatggtgtggccttgggcagtggtcatgtgacccccatgctcctcagtgtccacatggggtgttgctagatgacataaaataatgggtgagacgtgctcagtataatgagagcttgagaaggcagatcccaccccccatccccacccccaccccttgccgccttgccaatgctttggcagggagagggcagctccatagggcagctgagaaacagcccctcactgcccacacggcagctccagtggagggggaggcagggaccaggacaggaagcag

SEQ ID NO: 44664 - DNA, 2300 bp, Homo sapien
cagtcactaagcagcaactttcaggcacggtttcctcctggtcactgaaaccatttgccatttcctgttttctccattttccaacgattctaattgtcagtgtcaaaaggcaacaactgttttcttggggcttatctttggagcacattgattcagaacaaaggatgggagcctccatctgcaaaacaaaggaagcagcctcctcgggaggcctggagagaatgctctggctcctttggccagggacagcaggaccagcataggagcagaggactggcggtgcctctggacactgccgtaaggtgaagagcccatggaggaccgtcgcttgctggtggcaccccagacttgaagatcctgcagagctggccaccggcacccaggctgggtgtcagcagcgctgtgtggccttggcagtttccatagtgataggctggccagcttttccattagactccggggtcctctggaatgtgtgcttcccgggatgaagacgccccagcacccgctgaagcctgccctgccccggcgtggcctttccttttgtctggcacgcccctgggcttggctttctctttccgtccctcccttcggactttaccgcacttcccctgctgtttccttagtcacactctccagcctccatctgcccctgcccctgaacccctacctctgtacaactgtgttatttgatgaaactaatgcagcaaccggtggggatggagttaaggaccgtttagacctagccagccacgcaggaatctgtccccagaagcagcagaagcacctggtctgcagttaggagatactgtacttcttagccgtgtcaccttgggcaagtcatttaacctctctgagcctctgctgtcacatcagtaagctggggactgtagatcttctgccctgatgtcctgagactggtacaagaagagccaaagcgaaaggactgccttcagaaatggctgccaaccctgaccatctcaggcagatccggatggtgtggccttgggcagtggtcatgtgacccccatgctcctcagtgtccacatggggtgttgctagatgacataaaataatgggtgagacgtgctcagtataatgagagcttgagaaggcagatcccaccccccatccccacccccaccccttgccgccttgccaatgctttggcagggagagggcagctccatagggcagctgagaaacagcccctcactgcccacacggcagctccagtggagggggaggcagggaccaggacaggaagcaggctaagggcgggatagaaaagcaaaccccagtctggtggaatcgcttctggtgtagtcttcccggtgccatgtgtttgtcctctctgccttggcaggaaccaaggccaggaactgctgccaggcctgagagctgggcacagtcccaagcactgggtcgctaccccgccccactcccaccagccccactgagtgcagagaagggttcccagaagccctttgctggaaaagcaggcactgcacgggcagcccgtgttgtagaggcaagtcctctggcatcttgggggggacacagaccagaaagtggacttggagcttgtgctcccagacagagctgccttggtggttgagaaggggagagagatggcagcagttgagcagagatggccgggctcccctcactgtgtggggtgaggcttcaagcactggactgggagtcagacctggatccgagtcacaacctgacaccaaccggctgagggtctcagagcaagtcatgccttttctgggtctgggggccttcatgttattccctcctggctatgttcttcccctttgctccttgagccgatcccagactgagtgctgaaactgcggccttgaaacttggctcgctcctccccctgcccacccagccagctttcagatggagacaggaagctcctcccaattgcctatgctgcaactagtcaggagaagggcgggaggttggcagtaagtgtttggctactcccagtgttggagactgtgtccacctgaccatgtgatcatctggccgttcatgccaggaccaccaggaacaagcctcagtcctcttctcaatgtcctttccctatgacagccctgcagaggctaggtatccaccactacatagcccacagtctgctctgccccagccacagcatccttggcttgctcagccattctttgtctgggtagtttgaagtccaatccccactctcattacttaccatcctctgaatgcagccagtctgtctgggtctccctgagactggcatgcccagactcctg

SEQ ID NO: 44665 - DNA, 2300 bp, Homo sapien
ggcacggcaggggttactctctccatttcacaggccaaaggctaatcttctctactggccctttctggttgaattgcatctttctagaggtggggctgggctggggctggaccctggaaaaatcttcaggaattacctccttaggatgagaccatccctgctctgcaccttccccacctcctaacccccagctcctcccagctccatcgaaaagctttggcctcatcttgggacacttaaccaggcctattatatgcaaggtatcccaggcagctgctgccctccctccacccatccccattttcctctatccctctgccctaagattcacagataccaggaatccagagttattcagcagcccaccagggagcctctctagcatgcaaatttactgagcgtgctttgaaattcagcacaaaagtgaatgagattcaaaggagttcatagtctggggaggggagttggcagagcagacgtgtaagcaaatgatgacatcagtacaacaagaagggctgggtgggggagacttctaattgtgcgggggcccaggagcagctgctattctgctgtctttccaggagtttggcaaatccaggagagaggaccaagtggaaagggctggaggaaagaaaaaacccagtgcatcaagttccctggaactaggccagagcttggggtgaagagcaaaaagaggcacactgggagaagtggctaaagagtgggttgggttggattctggatggctttgttactcttctaagaagtctagactcttcaataaagcatatatatatgcatatataaatgatatatgaatatatgtgtatatgtgtgtgactatgtagaaacacacgtacacatatacactggtatcaggtaaaatgctgtttttagatgctggagaactaacacatacaagagaaaaaaaacaggtcatgataaagtcatcctatttactcgaactgctcatgtataagtattatgcagtacaaagaatattatgctcatttttctatgtgccaggttgtcttttctttttttaatttttttgacacgcagtctcgctttgtcacacaggctggagtgcagtggtgccatctcagctcactgcaacctctccctcccgggttcaagcgattctcttgcctcagcttcccgagcagctggtattacagacacctgccaccacgcctggataatttttgtatttttagtagagacgaggtttcaccatgtcgtccaggctggtctcgaactcctgacctcaggtgatccgcctgcgttggcctcccaaagtgctaggattacaggcgtgagccaccgcgcccggcccagattgtttgttttatttgattacacaatgaattctcttcttgaagtttgcctttcttctctttttcctgtccctttctttttactgtatcaatagttgtctgacccaaacctcaacaagtagaaggaattttggactgaaatgtttccgttcactaagtctcaattgcgttcttggaaaggtgctggcacagctgagggacaccccagctgttagttgagtttgtgaattgcagatcctgccccagagtcagtgaaatttctttttcccttatactatctcaactttacgcagccaaccctgtgtacccaataatagctcaatttagtggcatccgctaaagtcttgtatagagaagttttccctctggatttcccctttactgaagaaaaatggggagacccagacaagggtcccgggactacgcttcccagccgcctccgcccggcgcccagtccaacttcccttacagggatggcccctggcatcttggccccgcccatccccagcaccatattgcgaactacaattcccagctgcctccatgcgtcggacccttcaaaatgggcttcccagcagcctctcgggcgaagagccccgcccttcggagctgctccccaggtcgacccggcgcactcttcctgccccctgccccgtcacgtgatgcagtcccgccaaccggcacggggaggcgggcagcgggcggtggccgggggcgggcaggccgtggggggcggaccccagagggggcggagcagggcccggcagccgagcagcctggcaacggcggtggcgcccggagcccgaggtgggtgcgcgctcacggctggcctggctcggagccgggcactgcggggacccgtggtgaggggatcgggaggaggaagttgggactccttgggccagcgggtcgcgcggggccttgccgcaccgtcagggttgggtgggggtttcgtccaagcgc

SEQ ID NO: 44666 - DNA, 2300 bp, Homo sapien
gatgccagcacaatgcttcttgtacggtctgcagaactgtgagccaaaataaacttcttttctttataaattaccaggtctctggtattcctttacagcaaagcaaaacagattaatatacctactaatccacacctttgcccataactgtgccttctgcctggaataacttgactcctttgcctcatcaaggatttactcatctttaaagattcagttttatgtcacctttttggggaagttttcctgacctcctcttctcctatggattggggtaggtgttccacatcctgtgcaattgtccccattatagcacttgccaacttgtaatgtcattgttaatttgtctgtccccttcactggattgtgaacatcttaggcagggatatgtcagattcatctctgtcctctaaatcctaagtgtacttaactgaattggaagtatgacagtgtcacagtgaattcctctttggcctaatgtttcttaaagaatatggtacttaaaatatgcttaaagttgcactgttttctttctgacaattctcagcacagctaagatgcttgcagctacttgtaacaaaatacccaactaaaagtgggtgtcttagtgtgcttaggctgccaaaacaaaataccatagactgggtggcttaaacaacagaaattttctcacaactctggaggctggaaagtccaagattaagtgtccagcagggacctagtaagggctctgttcctggcttgcagatggccaccttcttgctgtgtactcacacggccttttctcagtgtgtgcatgtgagtgcatgagatcaagctctctggtgacccttcttaaaaagcaccagttccatcagactagagcttggccctcatgacctaattgcctctcaaagaccccatctccaaataccatcacacagggaattagggcttcaacatatggacttcagggggatgaaaacattcagtccataacagtgggttaaccatttgatttaataattttagaaagccagcaacctgcagtcggtgattctccagtgtgagataggagctattattgtctggggatcttcctttccttcctcctagccctcctcactctgtcatcttcttaccccaggctcacctcctcttgtgcgtaagatggctgtcggggcttcaggcatcatatcctcaaagttcagtttgaagttattaagctggtggggcaggatgggtctgggatgggcatgagtaactccctgtctgcagatctgccttttaacagtgagcaaattgttccctttatatcttcttttccagacctgggtcgcaggcctcctgtctacacccagagcaatcacaggcaaagaggcttaatcacgagccacacacccactcccaacttaatcaggggtgaggtgagaggggatgagctgttggatattcgaacccaaacaaaatgagcaaggaaataaatctagcccagaaagcaaatgtcctaaatgcctcaccaagatattggcttgatgttcatagcagtgattttttaatcaacagaagttaaatgttactcttaacataaaccatgggcggaagctccgagggcggcatcagaacacttggttgccctacagatggcaagggggtgggtttgtggcggggcggcggggtgcgtatggagggggagagtggagggaagaatggggtggggaggaattgctaaaatgcacggaattgctcctgcttcaagatgtcaagaccgagggagcttgagctgttctataccttttccgggaaggacaactgaggtgggaaatcatttttgatacttgaatgtcttcaaacttctttttacaccccacgtctctgcagtcaacccggtgtgactatagagtgaagcacgctacgcataatccgtttggggattccgaaccccagtggctctgtacgcacccaggtcgctggagcaggaggtcccagatccccgctgtaaggctccgtgggcgagcgcccaggtggggctgggcgaggtgggggttcccggcgccggccccgcgcgccgccctccccgcccccgctcccgccccccgacccccgcgcgcgcggccttgtgggtaacgcggggccgccaggtgacagctaatggcggcggccgcctgaggcgggcgggcggtatagagcgggcggcaggaggcaagcagcgaaaccttcccggccgccgctcccgtcccgacggcggcttccccaaggcggcaggactcggcgcgccatggacaggccggcggcggcggcggcggcgggctgcgagggcg

SEQ ID NO: 44667 - DNA, 2300 bp, Homo sapien
gattcctaatctatattattttaaccatgcatctttggataaggaggaggatggaccatgtcattttgtggtctcccagtagaactaacatagccctgaccaacatttaacattgaatttgttatttatagtttggctttcttccctgtataaaatgtgatgaaactactatgtgtagtatttctaaattgacctttaggtcctttaataaaacatagtgaaatattcttgtaactatgaaaataattactattttgaattttcaataatttagaattataaaagacatccatttaaaaatattttgctttacaaaattatgctgaaagcgtagtattattcgacctattttccactgaacactagtggcctccgatgttaacaggtggaaaaagcagtcccgatcaaataggtatgaggaatgcattatactgtggcgccctcttgcggattcggtgtgcattgacacactaaagatgtctcactaaaaaaagcaaatgaggccgggcgcggtggctcacgcctgtaatcccagcactttgggaggctgaggtgggcggatcaccaggtcaagagatggagaccatcctggccaacaatgtgaaacccctgtctctactaaaagtacaaaaattagccgggcgtggtggtgtgcgcctgtagtcccagctactcgggaggctgaggcaggagaattgcttgaacccgggaggcagaggttgcagagagctgagattgtgccactgcactctagcctggcgacagagcgagactccatctcaaaaaaaaaaaaaaaaaaaaaaaaaggagaagaaaaaaagcagctgaacttgttttgcttaacccagcatttcccaaacttttatttatttatttattttttaagacctattcacatctcttgggaaagtaatgctctatgaaatacagctttggaattgctgggggttctgatcaccttattcttattcatgacacattatgtcagagatgccaaggagaaagtgactggtttccttggcagcgtctcacagggtggcggtaccttggaatagaccccgagttcaggctttggtccctagctttgtagttcaagaacaccattttctcacctcccctcaattatctggcactatccaaccaagctcacaagggagtggctactgggctgcagtgccaatctgctaatttaaaaacgtgggcgtgtatttttctggccatctaaggtatccttttcctagcatcattgtagccaggaaacctagtaaatcattagcaatttgcttggtgagtatgaaattactgcaaagtaaattgtcttgagacatgcctgacgaaaacaccctgctccgcagcagggattggaatactgttgcctgccagatgagagcacactctctcatggcctggattgggtgaacactgacaacttcactcttcatgtccctggtcatacgctttgtgcatgcatgtccgtgtgcacgagcacacacagacacacacacacacacatagctgggctgcagtagcaaagcctaggcctttccttagttgtgtactgtaccgagactgttctccggttattttcattagacttctggccttcccaaactttctcttaggctgggtcatttctccagttagctaagcacctatagctcatgttggtttcatttgtattagtttcatgctcagaaggtaacctttttctggccttatttgcaaattctagagacaccttttaatagctatctgtgtagtgattacagtatctttctgtcatgtcaagccatttctgtattaatgcttcctaactgtgaaatttaaatatgttgtaacaatttgctagaatatgcagcatggtgtcttgtgatgctaagcttttaagttgtctttgaaggggttgggtgcttattttgcacgcttctgtagccttatagtgacatcacagaacaccgaaattcttcacaggtatacggaaagtgagatttactcccgtttggtgtcctttttttttttttttttttttttttttttttttttgccaggctctaagggatggaaataagctggcacagatggaagaggctccacttttcccaggagaatcaattaaagccattggtaagtttagtgtgtacacttcgctttttgagatccataaaatgaaatggcacttaatttgcaagtggaggtgatgtatgtgctggagatccgccagaccaacttaattaggggacaaatggactagatctattcatcctcattagtgtcatcatgacctaagagatagaagactg

SEQ ID NO: 44668 - DNA, 2300 bp, Homo sapien
agtcttcaaatggcattgctcctcgaacttggtctggggtcctctttgctctacacagactcctggggccatctctgatgacacggctttaaacactgtctgtatgctgagttcaacttgagcttgacactgcagtttctctcctgtcctgatccctcctaaggttgagactggatttctatcccattgtatggttgacatctctgcttggctgtttcccagaccacaaaccctccgtatattccaactggcctgagaggcacgatggcaagttggtgagaccccttggctttggaatcagttacacctgggttttcctccaggttctgccacttggtgctctagaatcctgagccggttacttaacctctctctgtgcctcaggttcctcttctgtaaaacaggagataatatcagtgtctcatgtcatgggttgtgtgaggattaaaattcagtgagaagaatgcatgtaaatgacttagcacagtggtgagtgcatcctcagggcacagtacatgatgctgataagctcgccacccctgtggtcaagggtgttgcccaggtgtctgacttgagggtgaatagtggtgtctgttactgagatggggaagactgggagaggaacagggcagggaggaagatggggaagtattagttttctgaggctgtcatacaaattactaccaatttgttggcttacagcaccagaaatgtattgatcacaattctggaggccaattctgctccctctaaaggttcaaggggagaatctgttccttgcctcttccagcatggggtggctgccccagccttcctgggcttgcagccacatcactccaatctcttcttccgtcatcacatgaccctctcttgctctgggtttctgcgtctcctcctttctcttctaatgacacttgtgatgacatttaggttccacctgaaataatcctggatccttaaacacatctgcaaagaccctcttttcaattaatcttggaatccttaaacacatctgcaaatctcaggatccttaaacatctgcaaagaccttctcttcaaataaggtcacattcaccattgccagggattcgatgtggatgtctttggcggggccacttttcagcctaccatagggaggcatccctcagtgaggcccccttgctccccacatctggatcattagctgtgtcagtctttctacatctctgcctcccacctgtcaccaccatatcccaaggaattacaaaatgtgagaaaagccatattggtggaggccatcttcagactagccaacagggtgagggcagttcattgtgttttatcccatgcaggagagatagagacaggacactaaattgtatatctagaataattttaactatggcagtatatgtgtctaggaaacagtattttctaggtctccactggttctttatatataagattatgtcatatgcaagtcgagataatgtgacttcttcctttacaatctggctgcctttcatatcttcttcttgcattggtattgcattggttgatttttatatgttgaaccactgtcgtggattgaaaaatgtctcccaaaagtttgtccaactggaacctcagaatgtgaccttatttagaaataggatctttgcagatgtattaattatgatgaagccatcttggagtagggttggccctaaatccagtgcctagtgtccgtataagaaagccatgtagagacacaggcacacacagaaggaagatggcgatgtggcaatagaggcagagatttaaatgatgcagctagaagctgaggagtgccaaggacttccagcaaccaccagaagctaagagagagacatggaacagattcttccctataccctcctaaaggaaccaactctgccagcaccctgatctcggactttcagcctccagaactgtgagagaataaattttatgttgttttaagtcccccagtttgtgatagcacccttaggaagctaataaaacctccttacattcctgggataaatcccacccgttcatggtatgtgatcagtccccttcatatactcttggattgggtttgctagtattttgttgaggatatttgcatgtattttcataagggatgttaatctgtggttttctcttcttgtgatgtctttgtctagctttggtatcaggatacagctagcctcatggaatgaactaggaagtatgccctcctcttctagtttttggatgacccatcatctcttacctcacctacagcaggaaccttgaaattggacttctgcctcacaccc

SEQ ID NO: 44669 - DNA, 2300 bp, Homo sapien
ccggatgttccttggcttgtggccatatcattccaatctcggtttatatcctaaatccagaatgacctcatcttaacatccttaacttaattacacctgcaaagaccctgttcctgaataaggccatgttcacaggttccagggatgaggacacacgcagatcttttttggcatggggcggggcattcttcactatagcatcgtcagcctaatggtgagatgcgacagtccacagttttcacatccatgcccattacaaaactgggtgagatggccaggccaaaggatggctttgagactttaaaaagcatgctgggtaaaagaaactatttaaactacaggtctgtagttcctcgtaagagcagtgtcccgggcatcgtgcgcttgccagctacctgccattgcctctcttccgggctctgcacatgggtgaaaagccagccctgtaactcggcctggcaagggcagggccatggatggggagagttcttgggctgagcagacagggtggccggcttgggccctctcctgctgggccctcagtttccccatcaagggtatctcgacttccttctgctctggaattaaaaagtcagaggctggcttgaggctgctcaggtgtcagtaggaacagagagagaaaaataggttgatttccaaagcacaaagtgaacatcttgattgtatctgtctctgtgggacattaaaatgaaaggaaaatacattattttcatgcttatttcctaaaacgggccagtgtgaggttttgcgaattggatcagcaggcaaagcggggcagctcccaggaaccccgtcggcccagtgtgtccatcttggatttcagtgcccttcccctcccctccaaccttccttctcccatggcgccttcctgtgtggctgtctccccaagctagaggctgggagtcctcctgtccccccacctcatgtccgtgcattccccagtcctgggatttgtgccacctgtgtaggtctcctcttgagccacacctccctatcaccattgccatggcccctgccagtccagagccaaggtcttctcctcatctcccgtccaaaaggttccatagacctttttgcctgtgcagtctcctccacacctcacgctcctccagcgggacctgttttaaaatgcctggatcccccttatgcttcctgctgccctcaaggtcctggctgagcctgagtttggcagtggaagcccttcatggtttggtcccaaccacatcctttcccctccataggcttcccagaggcctttcacttcccgagggcgccaggtgctcttccatccccatcccgggcctctgctgtcccccgtcctgacctagctcctctcgccctgcaggcctggagcagcctctcccagcctgtggtcctacagcgccccctgctgacctcacctggtgctcatggggcgggattgggccggttggtttctgagtgtgcgactcccagctcgccttgccccctccgtgatcaggagtctctggaccgtccattccgtggcggggctgcgtgtacatcatgtccctggcacctggcccgggccagaatcaggaggagtcccgcagacgtttgtggggtggctgaaaacactgagaagctgggggttgggcctcctgtccccactctttcccctgagtctcagccactgccacatggagatggcggtagaggggaccggggtgcagaacaccaagctctggggagacagcaggaggtggctgcgaggaaggcctgcccccaccactgtggccctcaggtgctctcggcctctgctgctgccaaaaggcccatgctggggacccttggcttcccttgcctttgccctcagtgtggaaagcccgcatgtttgctgtcaggagcgctcttactccagggattctaagctttgtgtcttgccttcagatgcagcagcaggtcaaggtaacgctgctttgccttcctcactttccttttgcttcagccttgatgcttcctcattcgccccctgctctggcgcttccttgccgctcttctccctcctgcttccctggcactcaccgacgtggctgtaaccaggaccatctttagcttaccctgatgcgtgtgagaggatgccacctgccagacactctgtccccaggctggatgtggcaggggtggggggagagttgaggtgccatggtgaggactcaggtgcccactggtggtcatgcctggggagcacatagagggccacccacaggaaggagacgatccagcgcccactgggttggcagctagcagtgatcacgagg

SEQ ID NO: 44670 - DNA, 2300 bp, Homo sapien
aattttaggatgaatttgtctatttctgcaacaaatgtcattgggattttggtagggattccattgaatctgtagattgctttagatagtatgcattgccattttaacaatttagtgtcttctaatccatgaacacaggattaggttgtattttgatagttggtggtttttgagaaattggtccatttcttccaagttgtcaaatatgtgagctaaaaaatgttcatattattccattattattcttttaatggttacaagatctacagtgtcccatttcagtccttttattggcatatcatcttttttaacttttatgtttgttagtaaggctagcggtttatccctttttactgtataaataaacttttggttttattgatttttttttagtattgcattcttattttcagtttcatggatctctgctcttgtgtttattttttccatctgcttgctttggttttgtttttctagtatctagctagcttctttttctagcatcttgaattagtaacttagattattgatttgaggctcttcttcatgtctaacttatgcattgagtgctataaacttctctctgcactgctttagatcccacatattttgctatgttgtgttttcattttcacacagttctatgtattttttaaaatttcctttgaaactttttctttgacccttgttttatttagaaatatgttgtttaatatccaaatgtttagagattttcttgttttctgttgtttcttctctgtttctaatttgaattaagtataatcaatgatacctctctgcataatttcaatacttttaaatttgttgaagtttatttcctggttcagaatatgatctcaggtgaatattctgtgagtgcttaaacaattgtttactctgctgtaattggctggtgtgtcctgttgtgccaattaaatcccattggttgattattgttcactccttcaatatccttgtagattttctgtctagtagttctaccaattgctgagagtggagtgttgaagtccccaactataaatgtgcatttgcttatttctccttttagctctatcaggttttacttaatgtgtctagacactctattgttaggtgcacacacattcaggattgttacgtcttcctggtggattgatccttttatcattttataatatccctcttcattccatctgagaactgttgggttatgacttgacttactgtattgtttttgtattttctttgcagaagattcagacctacatttctttgatccacagacaacaccaaaggtctatcgaaaaatgataggcaatacattttaaatgtccctaggcagtttggatatcacattattgctctgtaaaactcatttaggttttttccccagatacatcgctgtttctctcccaggtgcttgctgtatacagcactgtctctgtcttttccctctattaacttcaatagtgggaacagttacagcacagtcttctgaagttcaagagaagaatcatttggaaaattcatgaatgccatctgtgtaattggtgtgaaagaagtccatatttgaaaggaatctggttgagcccagagacctgatgtttataatagtaaccacagttatataaaattatatatgtgtgtgttgtaagcactttccgtgtataagatactaccacagtccactgggaatgcatcctcaatctgtccatccctgggcaggattagctatagttcaagtgccaggttgacagtggtggaaccaaggcttggagctcaagctctagaactcctcggtccatgtggtcatctcccgcagatctgggctcaagtcccagctttgccacttacctggccacatgtgggactatgtctgcctcataacccccatcccctgaagaaaagtgaacagaacccacctcatttaagccttttatatctctttgtcatccgtctcaaagtgattctgcagaggtcctataggagcctcaaggaccaagacaagaatattcatgatgtgacttccctgagccatgaatggctgctgcattttgttcctaaatgtgctccctttgctgtcctcccttccccttttagagagatggaaccatgtaaccaccacgaccaagaggccagtaaccaccagagctccagcaaatactttaggtaaggtggccgctctgaggagagtagtaaggcaaggatcccatggggctccctctgagacaggatccaaatgagctacccatagatgaactaattgagtatttcttttattttgggaccccatgaaggaa

SEQ ID NO: 44671 - DNA, 2300 bp, Homo sapien
agacattttaacaatattcttctaatacatgaacatgggatatattttcatttgtgtttttcatttttcatcattgttttatggttttcaaggtacaggttaggaggtacgggtcttttacctccttggttaagtttgctactcagtattttcttttttgatgttattataaatgggattgtttctttttttcagacagttcattgttcaaatatagaaatgctattgatttttgtatgttgattttgtaacctgctactttactaaatttgtttatcagttctcatagttttctggtggagtcttttttttttttttttgagacagagtctcgctctgtcgcccaggctggagtgcagtggcgcgatctcggcttactgcaagcactgcctcctgggttcatgccattctcctgccttagcctcctgagcagctggaactacaggcacccgccaccatgcccagctaattttttgtttttgtatttttagtagagacgggttttcaccgtgttagccaggatggtctcgatctcctgccctcgtgatctgcccgcctcggcctcccaaagtgctgggattacaggcgtgagccaccacgcccggccctggtggagtctttaggcttttctacacataagatcatgtcatttgcaaagagagacaatttaccttcttcctttcctacagagaggccttttatttcttgttcttgcctaactgctctggatataacttattctgttgaataggagtagtgagagtgggcattgttgtcttgttcctgatcttaaaggaaaagcttttaactcttcactattgaatgaatcaaatgattttttctgcatctattgagatgaatagctgggattacaggcatgcaccaccacacccagctaatttttgtagtttttgatagagacagagtttcaccatgttggccaggctggtaccaaactcctgacctcaagtgatctacccaccttggcctggcctcccacagtgctaggataacaggcgtgagccactgcacctggccgtctcaagatatttttaaattttccttttaatttcttctttgacctgttgattgtttaatttccacatatttgtgagtgttccaagatttcttctgttgtttatttctagtttctggctattttggtcagaaaagatacttgatatgatttcagtcttcttaaatttgtaaagacttgttttgtggcctaacatatgatctatcctggagaatgtttcgtgtgcacttgagaagagtgtgtattttgttgctgttggttggaatgttctgtaaatatctgttaggttcatttggtctaaagtgtagttcaagtccaatatttccttattgattttctgtctagatgatctgttcaatgttgaaagtaaggtattgaagtgttctactattattgcattgcagtctctctctctctttagatttattaatatttgctctatatatttaggtgcttcaatgttgggtgtgcatatatttacaattgttatactttcttaatgaattgacccctttagcatataatgaccttctttgtctctttttacagtttttgactttaaaagtctatttttcttttttttacttttatgttcagttcagggatacatgtgcaggtttgttataaaggtaaacttgtatcatgggggtttgttgtacagattacttcctcacctaggtaataagcctagcacccattggttatttttcctgaccctctccctcctcccaccctccactctccaataggccccagtgtgtgttgttcccctctatgtgttcatgtgttctcatcatttagtcccacttataagtgagaatatgtggtacttgattttctgttcctatagtagtttgctaacaatactggcctctattttgtctgatgtaagtatagctaccaccactcactttgggtttctatttgcatggaataccttttgttattccttcactttctaaagggaaatgaccatttctagaggatatttcattattactttgttttatgcaaagatagtttaatttttttttttaatttttaggatctggggactttgatgattttaacctggaggatgcagtgaaagaaacttcctcagtaaagcgtgagtagtaaatcaaataaactattaaaaacaaacagtagtgattaatgtgtatcatccactcagaatatatgcgcaagaaaaatgatatattttacttgatcagatgaaatatggatagtgcccggacacggtagctcacgcctgtaatcccag

SEQ ID NO: 44672 - DNA, 2300 bp, Homo sapien
ccactacttttagctggaaggctgaacaaacaggtgggagtaggatttagcccacggggtgtagtttgagaactattcttgagctagaagacagtcttattgcatatggcattgtagcacctttagcagctagagttccagttgagtgtgactgtccactgcatattgattgacatggcctcaaacttaagaggttacatgcttctcacctcctcagtgtagatgagtgtgtatgcatcagggtttacccatcagatcctggaagactcctaaagaccagaaaatctactgccctccaggtacagatggtaccaccagggcctatggaatggctcagggcacttagtagcaaaggtgggggcatgtccacagcctggaatagacagtaacctcctgacctcacagtggccactatttccttagccgttactagattaaccagtaatggtccctgccctctgtcactgtgtgcaggctgtccacttttcaccacctcatttaatccttagcacaaccttgttgggtttagccaggatttgtacccggtctggctctacagcacacattcttagccattcaccagctggggttcctagtggtaccctccccctttgacacatgagactagacctggctaactccccaacctcaaggaacctccattttgctgcttttccctcgttaataggtgatgatacataaggcattgtgaggaataaaaattaagggtaaaatgcctggaatatgccatgtgtatagtgtgtgttcaataactaccagctatttctgttaattctacagctagaatggaataatgttccattcatagagtaattaatgccctgagcctgggaagatccactcctcatatgctgttttgtttctgcagccctaagattcagggcaatggatgtaagccacacgggagatttcggctccatctcagggagaccccacaccccactgttccttaggggttggtgggagccactgaggggggtgcctatggcagcgagggctgggttgggggcacaggaaagctgccgaatggatattgaggggaggtggtagtagccgccctctaaggaggatgtggccctgggcagccggtgccgcataatggcagggacaggctcacgctaccactccggagagcagtagcgcttcctctttgtcttcgagagccggttgcagctggggctcttctagggagcgttcccatcaactgctgcagcgggcattttgctggtcggcacagtatcgtatcggaatctgatttcttcgggtctgggagacggactccgtttgcgggggttcatgggaaaggactgcagcgcgtttgtcggtcattaagcacgtttttgagatcgactctgcagatatgaacttgcactttcagcgcattcatcaaagcctcgggagagctgacccagtccctacccccagtctcccgagcccgcggcgcttcggctccgggacgcccccatcctcccctgtcgcccacccgggcgcccccggcctcgttttctcgagacgtgtcactgcttgttgaccgcagccagtcacgaaaacggtccttttcttcagtctccggccagggtttcactcctgcagggaacagcgggtggggacagagtgcggggctccgtgctggacggtgtctggaggggccccaagggaacaacccttcaccgggagaacaccaaggccagaaggggaagagcccttctcaaggtcacccgggaggaaatcggcgcccaccggcgctgccgcctcccgctccccggcactggtgactcactgctccaggtccgcggggccacctccgagacttcggtctcgaggaccgaggtgggacagggtctgcggaccgcgcgctgccgctggacccagcccaacccaacccaggcctccccacccaccgggtgcccgcaggccacgcccctcgcccggagccccgcctccagaacgcggccccgcccccgatactgcagcctcgccccgccccccggcctaaccccagcccaggcgccctcaggcgccggctctctagcgcgcccgacctccatcttcccggggccgcgccgcgcgcgcgcgcgggctttgggcgggaccctgcagaggcggcggggctcctcctcccgctcctcctcggcctccccttcgggcgctctcgcgctaactgtgctcctccggggccctccgcctgctcccagccatggtggcctggcgctcggcgttccttgtctgcctcgctttctccttggccaccctggtccagcgaggtaaggcgggcgggg

SEQ ID NO: 44673 - DNA, 2300 bp, Homo sapien
cctgccatgaactatctgaagggtgagggattaccctgtgtggagatgttgaccttaaggctcagaggtggctggagatggaaggaactgccatgaaggaagatggtaagctccctatgagtggaggtatgcaagcagaaggcaggcaaccactaagctggttctaacaggacagagggatggatgaggtggccttaagatctctgaactcctgagtctgtagtggggacctgggttagtgacacaatacctgcctgctcttgtcaaaagcagcactatctctgccttttttttttttttttcggagtcttgctctgttgcccaggctggagtgcagtagcatgatcttggctcactgcaacctccacctcccaggttaaagcgattctcctgcctcagcctcctacaggcatgcatcaccacacctggctaatttttttgtatttttagtagagacggggcttcatcagattggccaggctggtcttgaactcctgatctcgtgatccgcctgcctcagcctcccaaagtactggaattacaggcatgagccaccgcgcttggcctctatctttgccttttgatctggattggaaccttgatgatgggagccaacagcaccagcttcaggggctcaggcttggctgggaggctcagaggagttggtaagagggggcgtaggggtgaagaagcaggtgccctgtgaagccagatcctttgcacacctcaaactcagccacggtttctggaagcagcatttggaaaattcatgttctggtggggcttatttctgaatataggactcataaatagctggatctcttggcctttcaaagaaaagaaaaaccaaactcatgacatctcttcctttgcattattttctccaactgtcaatctttaaactgctctttttctcaccctttcattctttccaggcaagggccctcagatactttctttccaaatagggctgatacttgcatttgaagtggagtatttcttccttgcgtgggactgtcctatgcaatgtaggatatttagtatccccggccgttccttcctcttattgaattccagcaacacctgccagtcatccaggcaccggccccacgaatttcagaacatcccttacagaagtgacactgcggctcctatactttgaaaaacattgcctgaatccccaaagaagtgactagctcaaggccataccaccagccaatggcaaagtggagatcaagtcaaatcccattcattcattcattcactcattcattcccgaagctttaattctttgctctagggtgtgtcaggagagcagagggaatgagggccttgaaccgagacagtgaagagggtaagaagaaaagtgttattctttgcccacaaaactacaatttctcacaaattctctgctcttgccaaattttgttttcctcttttagcccgtcggttccgcaatttcgggcgcaaataaagaccttctggcatttagtggaaagagcctagttgagcacgatccgcagaagcggaatcaggtggctttcggataggcagcgagatccgaggactaaatcccgaggtcttggcgagcaagcagctgccctccgccaggcatcgaggagcgagctgccgccgcgtttctgtcgcggcgccgcggccgaaccgggtagaggtggtctaccatcggcccttcgtggtgggcccaggggtgtttccccgggcaggggagctgactgcaggccaggggcgccaaggccgcggtgcggtgggagcagagggcagcgcagcggggctggacttcatcttcccacgccagaggccgaggcctccgggaatcgcagggccacctcttcaaagcccttggcgatcccagttctgttccccgagggggctggcgaggtgggcggggcgggcaggcgagactaggtctttccctgtttggcctccgtagccggcgccggcgggtcgttctgtttgaatgaatgatcccagcagccgcgcccaatgggcgtccacgcctgcttaatatgcatgaggcccgcagccaatggccaggcgaggaggctgttttaaacggcagagcccgctggccaatcaggcggctctcgtggaggcagctagcgcgaggctggggagcgctgagccgcgcgtcgtgccctgcgctgcccagactagcgaacaatacaggtacgtctcgcaccgcccgctcccgccgccgccgccgccgccgccgccgccgccgccgccgccgccgccgccgccgcagcgcccgcacaactttccggcccgcgccgccgtga

SEQ ID NO: 44674 - DNA, 2300 bp, Homo sapien
gaggaattgacaagaagtacaagacgtaccaaaggcagagcaaaactaaaactacacttgctgttaggaagtccccttcccccaatgccggacaccagtggcagaaggcagagtaggaaagaaatcagcttcattgtcgcttgtcatttaacttttgaccagcacgaagcgcgctggtttgcgagttacttctcaaaagcgatcaagtgctccaaatggagccgacccaagtagggtactcagtgttacgtttacagaactgctatgttttggaaactacaatcacaaagtgggaagggtagagagaggacacatttggtgggggtgatagaagcttgaaatctatgacttaagactatctggtcatctgctaactgttaacacaattaaaaacaacaactcttaccactgctgaacacaagaccaaagcaggagaactatacgtaggggacatctgaaattgtcactattgttgatgtgttttggcttactaaaaaaacggctttacaacacgggagatctggaaagtgagcaggtacccccgtactattagttcaattcatcacttcgtcactatctaaagggggagggtgtataaaaagggctagtcgtgctcatctgtaacccagaatgcaggtccagccgagaacactttctccaaagtttccaaataaaaatgcagctgcggcatgtcatcgtccctgtcccaccccccagcttcccgccatcttttccttttcccacacccaaggtcatcatgtaaaactaaagagctccccttggcagcagccgcccaggaggctgcccaacagagacccgcagcggcggcccgggcggggcgggaccgggagcgggggagtcccggccggcagcaggcagcccgcctcggcccccgtgccgggtcaccgggacacccgtaattcaccttccattttgtcaaaagcctcctgatgaaagaaagtgcccctgaaatccgccgctgtcatccccgggggacgcgcggggccgggggcggcggcggtggcggtgcgcggggggtgtgcggccgggccggcggcagccgcggcactggtggcggcgtccgccgcgcctcggagtcccactcgctaaaatggctgatccgcgcgcggccggcgcgggcggcggcgacagcggcgaacaaagcggcccgggccccgccgccgccgcccgcccgtcggcccccaccccgccccgccccgccccgcccgggccgcccgggggctcgggggcccgggccggacctccccgccccccggcgcggggcgcactcctcgggataacaaaggcgcccgtgcagccatgacgctcggccgctccagggcccgcagcggcgcccccggccctccgagccgcccgccccgggccgcgggcgccggggccgaggccggagcccgccgggcgccccgccgaccgctccgcccgcctcccctgccctcgccggaggccagcgccgcgccagccatgttagcggcggcggcggcgccgggcgggcgggaggcgagaggggggcggccggcccgcgcccccccgggccaccgggcgctccgcgacggccatgttaacgcagagccagcggcgtagcctgcgggcccgcgcggcgccgggccaagcccgggagcgaagtttgcccgtgcggcggcccccggcgggcaccagccgcgcagcccccggcgggcaccggccgcccgttccccagcggagtccgtcgcgggccggggaactcccggcccccttcccgctgccgccgcccagcgcccacagcccgcagccgcccctctgctcgcccagccgccgcagccgcagctgcccaaacatctggcctcgggggccctgggttcccggctgcggcccctggggccgccacgggcgggcgtccgccgagggggccgacccccgaaagcggggagctcggggaacgcgttggaaaagttgaaacacctgaattgcttcttccttcccggccgcctagcaggagggaaggcggagggggcgggaagggaatggggagtagaggcagggggaggcggcggcagggcgcgctcacggcggcgcgggccggaaagttgtgcgggcgctgcggcggcggcggcggcggcggcggcggcggcggcggcggcggcggcggcggcgggagcgggcggtgcgagacgtacctgtattgttcgctagtctgggcagcgcagggcacgacgcgcggctcagcgctccccagcctcgcgctagctgcctccacgagagccgcctgattggccagcgggctctgccgtttaaaacagcct

SEQ ID NO: 44675 - DNA, 2300 bp, Homo sapien
cgcgccctgccgccgcctccccctgcctctactccccattcccttcccgccccctccgccttccctcctgctaggcggccgggaaggaagaagcaattcaggtgtttcaacttttccaacgcgttccccgagctccccgctttcgggggtcggccccctcggcggacgcccgcccgtggcggccccaggggccgcagccgggaacccagggcccccgaggccagatgtttgggcagctgcggctgcggcggctgggcgagcagaggggcggctgcgggctgtgggcgctgggcggcggcagcgggaagggggccgggagttccccggcccgcgacggactccgctggggaacgggcggccggtgcccgccgggggctgcgcggctggtgcccgccgggggccgccgcacgggcaaacttcgctcccgggcttggcccggcgccgcgcgggcccgcaggctacgccgctggctctgcgttaacatggccgtcgcggagcgcccggtggcccgggggggcgcgggccggccgcccccctctcgcctcccgcccgcccggcgccgccgccgccgctaacatggctggcgcggcgctggcctccggcgagggcaggggaggcgggcggagcggtcggcggggcgcccggcgggctccggcctcggccccggcgcccgcggcccggggcgggcggctcggagggccgggggcgccgctgcgggccctggagcggccgagcgtcatggctgcacgggcgcctttgttatcccgaggagtgcgccccgcgccggggggcggggaggtccggcccgggcccccgagcccccgggcggcccgggcggggcggggcggggcggggtgggggccgacgggcgggcggcggcggcggggcccgggccgctttgttcgccgctgtcgccgccgcccgcgccggccgcgcgcggatcagccattttagcgagtgggactccgaggcgcggcggacgccgccaccagtgccgcggctgccgccggcccggccgcacaccccccgcgcaccgccaccgccgccgcccccggccccgcgcgtcccccggggatgacagcggcggatttcaggggcactttctttcatcaggaggcttttgacaaaatggaaggtgaattacgggtgtcccggtgacccggcacgggggccgaggcgggctgcctgctgccggccgggactcccccgctcccggtcccgccccgcccgggccgccgctgcgggtctctgttgggcagcctcctgggcggctgctgccaaggggagctctttagttttacatgatgaccttgggtgtgggaaaaggaaaagatggcgggaagctggggggtgggacagggacgatgacatgccgcagctgcatttttatttggaaactttggagaaagtgttctcggctggacctgcattctgggttacagatgagcacgactagccctttttatacaccctccccctttagatagtgacgaagtgatgaattgaactaatagtacgggggtacctgctcactttccagatctcccgtgttgtaaagccgtttttttagtaagccaaaacacatcaacaatagtgacaatttcagatgtcccctacgtatagttctcctgctttggtcttgtgttcagcagtggtaagagttgttgtttttaattgtgttaacagttagcagatgaccagatagtcttaagtcatagatttcaagcttctatcacccccaccaaatgtgtcctctctctacccttcccactttgtgattgtagtttccaaaacatagcagttctgtaaacgtaacactgagtaccctacttgggtcggctccatttggagcacttgatcgcttttgagaagtaactcgcaaaccagcgcgcttcgtgctggtcaaaagttaaatgacaagcgacaatgaagctgatttctttcctactctgccttctgccactggtgtccggcattgggggaaggggacttcctaacagcaagtgtagttttagttttgctctgcctttggtacgtcttgtacttcttgtcaattcctccttgcttttcctcattgtatttctttgtttctcttttatcacagtcaggatggctaaaggtgaccccaagaaaccaaagggcaagatgtccgcttatgccttctttgtgcagacatgcagagaagaacataagaagaaaaacccagaggtccctgtcaattttgcggaattttccaagaagtgctctgagaggtggaaggtatttttctttggtacccttcaaactagtcttagttgggt

SEQ ID NO: 44676 - DNA, 2300 bp, Homo sapien
cttcaaatgtattttgtttacttatttgaattcaaaatcgccccttcccacaagtgaagggatccaaactctcggggaaccagcaagaacagcctgatgtgcatcctacaaaatactccactgcgcggacgggcttttgactgacagcctctttacagggcgcacagctgtgtggggaggacagcggagccccttcactgtctgcacttacggaaaaaaatgcgagcgcgcgcggccgggagttccagccagcgaggggcagtgagataatgaatgtgaaaagcctccaggcgggagattgtaattcgcgccggattcagttcacagacgcgaaagccgcaggattggggtgggggcttcattttcaaacaaggagacacatttccagtttaggctttatagctagagacagtgtgtgcaatcttggttttcaacagtgtctgtttttttcgttaaaggtatctgaatgttgaagttcgtcgcgtaacaggcccctactacctaccccgccttgtccgtccccccacccaccccggggcaagagggctgctgtgtccagacgatggcgctcccggccagtgcaacccctctcccctactgtggcaagaagactagtctggaacaagtttcaaggtgtttactgagattttgaaaggcttctcgacaggagccgtaacttttagtagccggcagaaatccattcccgtgaccaaggttattgagggaacgagtgtccgaatcacgcccctttagttttgcccgaatattcgaattttccgtggtccccgcggagcgagatcctgggcgcaccgcaggggaactgtgacgcacggggacagagatccgcggtgtggagggcgaggggggaggcctgagagggatggggtcgaaacgagaaccccagaagggcatgggaaaggagaaagaccgagaggaatcctgactgaggcagggatcgccggtcagccagaggcttcttggtttagccgcgtgacacctccgcacctttcccgcggctgcggcgcagctccttcagccttcctgactgccccgtgccgctcagtagagaatgccgagcatcccgagagggagaggcgtcagagcctctcgtcctgagtttccttgagaagcggggacccaagagaagagctttattgcctgttttactttttcccaaagcgtcccttggcttccgccgcctggctgccggcagctggaaaggagacgagctcccgctcccgttcgcccccaaactgaggaccgagtggccaccaatgccttccctaggtcccagggtgcagacccgctccccacttccagagtcgggcgcagggtacatctctttatggagagtgcaagacctggaccggactgagcggctactcgcagctgccgctaagggagccaagaggctcctggcgagaaagggagcggggttaagttccctagggattagggacccagattgggggtgggagctcccagcagtagtcccctgttccccgcgggacacagaaggctctagacaggcaagggcatggggcgtgggatggacctcacaaggatacttgcagaggcaagcatctagcgttcaaggggccaccggctatcccctataccctgctgggggctgtggactggcttggtctagcactggatcctatgaaagactctgtgctccggctctgcaatctacatctctttgccaggtgtttgcactggaggagagagggagaagaacttgctagaaacgaatgcacaggggctggtggagggggtgtggggtggactccgagctagtcatgatgcttgcaaggtacctgggagattgagaggcagggcaggctggctagagaggaagtacatacaaggcagtcggaagcaagatgacacctcaatgtggatttgtccaataagagggggtagccaaggggggggtattcagggaggtctgattggtcggggggagggatttggggtggggctagccgcctcttgaggctttaaaagctcatcggagaggggcgggatgctgtcatttgctctctgactctcagagagggaggcacgctttcctggagctcctggtgacagaacaggtgtttgctgtctggacctggctgctgatcctgagcctgctgggagatcttaacgatccccaggagcaacatggggcccaccctagcggttcccaccccctatggctgtattggctgtaagctaccccagccagaatacccaccggctctaatcatctttatgttctgcgcgatggttatcaccatcgttgtagacctaat

SEQ ID NO: 44677 - DNA, 2300 bp, Homo sapien
ttgaagatggagccgaccacactcagccctgtgatgaacccgaccatctggcactgtaactggctcagatcccagcccccaatggacatggcatgcagcatcaaagggtatgggtagatggccaccagcatatcggccacagagagactgaccacgaagatgttgcctgaaaaacatatcgagggagggagaaaggggaaagacagagaagaataagtggtttaagtacagaaatctacacatttaaggtgcaggggaaggccagctggattatgaccttttataattccagaattcttttaaagaaatgctctgagaaagaagcgaacataagacagacagcagtgagcacaaaatccctgccaggagccttcacaatgagacagggtcatgctgccaccatcttagagaaaaacaaaatgcaaacgtttccttcactggaggtgagggggagggagaaggaggaggggagtagaggtgagctagagggacttgtttttaggaaggaggctggagagtggggggcaaggagagacactggagggatgtcaggaagcctcaaactaaaaaaattaaaaataattaaataattagaaaaagataaattagccatctccctcctatagcctagcattgcatttataataaacacattactagagagaagattctgagaaaaggcattagaggccatcttcttaaacagtcttttccgatgggatcaagcagtaacctaaaaccttgccaagtcaaatacttaccgttccgaggtaacctaagagtgaaaactgaggggaagcagggaagccctgtaaaatttagtctgagaccaaagaagtagtgagagggcgggcgggaagggtggcgcgaggtgggcgggggtgggggggaggagaaaaaatcctgcaaggattagcagaagtgcctgtttcagttacatgccgcgtccacgtccacgcgcagagccgcgcactggcacattcagcgccctgcacagagctcccagcgccgggcactgaactttactggagccttcaggttaaacaggatagagaagaagggtcacccccactccggtcttgtagggctgaggtgggaacttttttgtaaaacctttcacaaaaaagagaaggaagaggccaggtgcaggcgcagagccctctttctttggagacacctcgttgctaattagcattggtttggcaaaatattgcacttcatcttggactaggagaaaatgagcgcttttgaaaagggcaaaggtatggctccttcttcctccttcctccagcgctgtcagcactcggcctcagcactttctaccgaagaggttctttctatggttttccggcagagtaatgaattcagggaaatacagccgaaaagagaaggggcaaagccttaaaaacaaaaccacaacaaccataaaagcctttatttgaattatagaaggaaggaaggagaaggagaaaaagaaagaaaagaaatctaaagggaataaaatgggcttcgcaggtcgcccccaggattccgtgggtttgcacctcgggaccgcaccgcgggggtgaaggtgaagacctagtgtatggccccacgattccaggagacgaaggagaaatcggagacacccaccagactttgtaagaaaacttttaatgactgtgtgccagtcagtgcgtttttaaacttgttcagtgttcgtgactccttgcccaagcaaagtaatcccccagaccccggccgccacctctcccccacgccctgcccgggagaatccagctggtctccccaccctctcagacccccttcggtccccactcctagccccagccgatcgagaatctggcggtggaaattccaggcgccgcccctccctcccccggcctgaactcggagtttgggcgcctttgccccttcccctcccttccagagccctctcccgcccaacctgtaagccggactagctgctctgcagtgtctgccgcccccacccccagcacaggtcgcagcgcccggcatcctcccacgcttccctcctgccctgctcgccgccggcccccggcccccggcctcctcccgctcggcagtggctagcagcgggggaagtcccgcctgcggctcccagaccccagccctttgcagcctctctgagtcccccatcgccgcctctgagctctcccgtcgccctcccgccaatccctactcggttttgctgccttctatccctccacccccagcaacgcccagctcccaagcctcttggccggcccgccctgcgaccccccagttccccgcttacg

SEQ ID NO: 44678 - DNA, 2300 bp, Homo sapien
tcaagcgattttctgcctcagcctcctgagtagctgggattacaggcatgtgccaccacgccaagctggttcccaattttttcaccatcaagaactattttgctctttttccttttgtggacccaatttatttatttaacaaatatttattagttcctactatataccaggccctactctaggtattggggaacaataagtcacaattccgttcccccacttgtgttcattctatgttttaaaagatttattctattaagtatactgtggcttattttcataataatctgtgaacagtcttttcttatgggataactaggataacctcatcatgatatagtaagtgtcaaaaatcaaagaacggtgatattttaagtagctttggatgcctaacagtaaatagattcattaggtttttaaaaatattaaaaactgccttcagaaccaccattactacatttatgggtccctagggattgaaggacctcactgcaggctgattagctagagcaggggtcagcaaactcttctgtaaaagggtcagatggtaagaattttgggcattgcagatcattttgggcgttgcagatcataccgtctctgtcacaactactcaacattgctgttgtagataatacaaacaaatgagaatggctgagctccaataaaattttatcaatagacgctgaaatttgaatttcatataaatttcacgtgtcatgttattcttttgacgttttcaacaatttaaaaaggaaaaaccattcttacctcagggctgtagaaaaacaggtggtaggctccatgtattaggtcggctggctcagtttgcctaccccagaggtagattctctttgtaccccaagttcttacattaggtggttcttactcacctaaaggtctagatgaggcccagatagagattactattatttttattaaatattttacagtttgttttttagagacggagtcttgctatgctgcccaagctgctctggaactactggcctcacgcaatcctcctgcctcagcttcccaaagtgttgagattacaggcgtgagccagcacagtcagccctagagggggattattcagtttgaactaaaacctggacttcctgctgcccagtccattgccctttccaccactctaagctgctggtttagtcatgatttcagatgtggtctttgtatccatgtggtgcagaaaatagctgtgtggtcagcggccctttccaggcgctgaccatgttaagggctgtcctcttattagcagccagtggcaacttaattttgtcaagcctgactccagacttacccaccctttcgtttttacctctctcgggttgcgcaggcccgggaggcccatctgttcttactatttgagtccctgttgtctcattggcggctttctgagcagctgcaaaatatgtttttaacttttaagtggaagttgggggtcactggcatcgagtctggaacagtcattctcagcaagagctctttgaactctgacattctctagttttacggactcgggtgagtgttttaactcctcccagctgccaagggcttgacttcctaccactgcgggcagtaattaatgaggcatttatttgctcaagtagtggcgaaataatgcgcactgcttttttgtgttgtcgtcggcggaatacgctcagttgcctagcaccacagccctctggctggtagtccctcttcgcggctcatatgctcgggtctccttgcggcccccagctcagcgaccgagacgcagacgaggaccagtgttcacgcgagttcagggggcggcgtagccgccgcccgcccaggaggaccatgttgcgcggcaagtcccggctcaacgtggagtggctgggctactcgccaggcctgctcctcgagcacaggcccctcctggcagggcgcacgccgcggagccaccgccggtaagtcatgtgagcgcccgcccccgcgccggcaacagccctgcgtcgctgcggcgcgccgcgccgcgccgcgcctgcgtactgtggcccgccgcccggcgcgaacgggcacttccggcgcgaacgggcacttccggcgcgaaccgctacttccggtgcgaaccgcctcggccgttccctcgcggagcttactgagcgcggccgccgagcccagctccgccgccgagcgcctgtgccggcacggctacaccatggagcgcccggataaggcggcgctgaacgcactgcagcctcctgagttcaggtagccctgagcggggcctggaccgcgaggcggactggccccag

SEQ ID NO: 44679 - DNA, 2300 bp, Homo sapien
tgtgtctgtagtccggtggccgcgctagtcgcttttaactggccgacaggcgcccggtatttagcctccgaattctaaggaaaaataggacagaatagcaagcgaaaggggtccgatggtactcactgcttggcgataggcgataatctctccgctcagtgataggcgatggtctcaccacttggcgatagtctcactgcttggcgataggcgatggtcccttcgtggtcaccaaaatgtgtccagaattggtgggttcttggtctcactgacttcaagaatgaagccgcagacccttatggtgagtgttatatttcttaaaggcggcgtgtccggagtttgttccttctgatgttcagatgtgttcggagtttcttccttctggtgggttcgtggtcttgctggctcaggagtgaagctgcagacctccacggtgagtgttacagctcttaaggcagtgcgtctggagtttgttcctcctggtgggtttgtggtctcactggcttcaggagtgaagctgcagaccttcgtggtgagtgttacagctcataaaggcagtgtggacccaaagagtgagcagcagcaagctttattgcaaagagagaaagaacaaagcttccacagtgtggaaggggacccgggcggattgccactgctggctcaggcagcctgcttttattcccttatctggccccactcacatcctactgattggtccattttacagagagccgattggtccattttgacagggtgctgattggtgcgtttacaatccctgagctagacacagagtgctgattggggtatttacaaaccttgagctagatacagagtacggattggtgcatttacaatctcagctagacataaaggttctccaagtccccaccagattaactagatacagagtgccgattggtgcattcacaaatcctgagctagacacagggtgctgattggtgtgttcacaaaccttgagctagatacagagtgctgattggtgtatttacaatcccttagctagacataaagattctccaagtccccaccagactcaggagcccagctggcttcacccagtggatcccacagggggccgcaggtggagctgcctgccagttccgcccagtgcgcctgcactcctcagcccttgggcagtcgatgggactgggcaccctggagcaggaagcggcactcctccgcaaggctcctgcgcacaggagccgacggccggggcagggggagcaggcgggggggcggggagtggggctggggtgagggggcagcggggggggcggggggtgggggggcggggggcggggggtcgggggtcgggggggcggggggcggggggggcgggggggcggggggtgtcggtggtcgggggggggcggggggggtggaggctcgggcatggcggtctgcaggtcccaagccctgccccacagggaggcagctaaggcctggcaagaaatggagcacagcagctgctggcccaggtgctaagcccttcactgcccgggccttgcgggcccaccgggccactccgagtgcaggcccgctgagcccacgtccacccggaacttgcgctggcccgcaagcgccgcacgcagccccagttgccaccggtgcctctccctccacaccttcccacaagctgagggaaccggctctggccttggccagcccagaaaggggctcccacagtgcagcggtgggctgaagggctcctcaagcgcggccagagtgggcgccaaggccgaggaggtgcggagtgcgagggacggctgcgagggttgccagctcgctgtcacctctcagttccacaatagagccatgattggactcaaaaagacccctcttttctgggatccatacattttctgggctccattaggtcctgcttaggtagtgctcaggggtccagggagggtggagagcctgtattggggtggaaccctttgactcgacaagctaagggctacgttgaagtggcttatctgcactcctagttccagagacagtagttatctcgggccccaacatcgcgaggtctagggaaaaatgctaccactcctcccccctacttccgctgccacgctgcctccatgcctgcctcccctctctgccacgcccccaccacgcgctttgcactctggggcccacgcacttccctgaagagtctagaagctgctcctcatttccagactttccgggcgcccaccaggctcccgggctctcaccggagaccacagggaggagcttcaaggtaccccaagtccctgcggcctccagca

SEQ ID NO: 44680 - DNA, 2300 bp, Homo sapien
tcattctttgtcgtggagccctcacgattgcttccttattgttgccatagtaactgtctactgatggtgtatttataggggaagaagcaggcgctacattttggggagggagggggaagaggcctcgtggcaggcagcagcagcagtgaaggtggctacagaattgctaatggagtgggccatgccatgggaactgttttgggggtgttcctggctcgactgaagcttaaaaatgaactggtgactttagcaggtgcgtcaggataacatgtattcgggtctatgataggtgtgacatatagccacctttgaccaaggctaggtgtgtgggggacaaaagatggatatatgtaatctattatgtaaatttttctccatttttttaaaaaaccactgcagtttcctttgataagcatatttttctctcttcccttattaagactatatgcattcttctcaaacccagatacaacagctccatttttcttcaagcaaaaaatccttgccatgaggcatactatatccacaccctcaccacataaagctcaggtatccataatgcaagcagaattttgagatcatattccatcttggttctgacaaacattgagggccaactgtctcacaaggcaggccatctgttgacaaattcacatgttgatagttttgagggagattgttgcagggttcaaaagagaaagccccttgatgtggcgtttccacaaatagatgtcagatctgctgttttacctttaattttcttttctttcttttctctctttctctctttctttctctctttctttctttcttccttccttcctccctccccttcccttctccttctttccttcctccttcccttcccttctccttccttccttccttcctccctccctcccttccttcctccctccctccctctctccctccctctctccctctctccctctctttctctctttctctctttctttctttctggctttgtaacccaggctggagtgcagtggcgcaatctcagctcacttcaatctccgcctctctggttcaagcgattcccctgtctcagcctccagagtagctgggactacaggcatgcaccgcagcatgcctaactaatttttgtatttgtagtagagatggggtttcaccattttttggtcaagccagtcccaaactcctgacctgaggtgatccgcccgcctcagcctcccaaagtgttgggattataggcatgagccaccgcgaccagcctaaattattgatttatatcctacctgtttgccaaaaggattaggtggcatattataaatgcacaataggacactggaaacataaatagaaagctgtataccacatcgcaggacagaagcatatgtgcttaacagctgggcttccagggtgcctgtgcttgactggcaatagtgacgctgaacttcctggcagcctaggcaaaaaggagggctcaatggattccacagttcacgtgtcttgcatccagttagtcatcaaaccagagcttctgcttggggaggggagcagtggggtgattgctcccagatgtggacagctcagcaagggctctagaatgtgtgtatgagtgggcgtgtgtattgtggggagggacagagggagcagtgtgctgtgaccatggtttaagtactggctggatagctccttagcaggagaaaggctttctgacaatagctcacattaggggcaactcttgtagttagcgtctcagtgtcgggcatctaaattcatgtcttggcactctactgccatgggctttaatgcaaagagagaagagaggcctggttccagaagattccaggtatcttgcctctttgtctggtgaagatgaacacagcgggtcacctgggtttgggccttctgattatgcctgggaatatgaagaatgcagcattgttgtgcatggaggatgagaccctgtagaagatgtgtccactgaaggttgctataggctagtcccagcagggcagtgacttttgagatggttgatgctgtgttaagctttgttttcagggaacatgcttgtcattggaggtatctgtgactcaccattgtgctcaaaattagttgtgaattctggtcctgccactgtcactgttgatttgcttaaccttgtctgagcccgtctctctgggctgtatctcctcatctatctctgaggtcctttccaattggaagttgcaaagattcattgaggggagcaaggaaggaggagcctcagcctttaggagctttcctttttaaaagaaaaaggtcaacccttg

SEQ ID NO: 44681 - DNA, 2300 bp, Homo sapien
gctggggtttttgagtggcattgggggttcagggattgggaaggaattctcccaccctctttgcttggctttaggtggtggattcctatgccaccagggggcagtgcctccacatgcacctggaccctgtgctcctgtgcccaagaagccccaccagggccagttgatagcgagacagaaatctggcctccatagcccgaggccctgtggcaagccagtgcccacactgctctagctttgctgacttctgagtgctcctcacaatccagccaccctgtagggaggcttgtccatgggggagactgacaccaaaagaagcgagaaacttgcccaaggtaaaatcttgaagtcatagtgagataagattgtcagatggaatacaggatatgcagctaaatttcaatgtcaaatcaatccatgaatcattctttagtgtaaatatgtcccaaaagttagtgtacgagagaatacttatactgttgtttatctgaaatttaaatgtacttcgtacctatattttcatttgctcaatctggctgggcttcccaggctcctgaatcccactgagctgagcacactcagcagtttctctgctcccaaggtggccctccagaaagctcgaatttcatcacagctgctccactggatctgggaagggcttctttggggcccccaggaatgcaggcagggcctatatcagctctggttcccaagctggacaggtgaggtgggggcagggggcaggcagcctcagaccatgccgccctatctcagctactcctggccccttcgtttccactttctctcccttccttccttccttccttccttccttccttccttccttccttccttcctcccttccttcttcttttcctccttccttcctcctcttcctcccacctggcccaggggctctgggggaagaagaggctatttgtaaaaggaaccttatataaacctgtcctgattccttttacaaatagcctcctattcccccaggggctctggggttgtttcctagaatgaagggttcaccacaggtagttgtagcaatcagggttttccagagaaacagaactgataggatgtatatatgtatgtatgtatgtatgtatgtatgtatgtatgtatgcatgtatgtatgtatatatctgcatatgcacaagtatatagaaatttattttaagaaattggcttatgcgattgtggggctgacaagtctgaaatgtgcaaggcagccctgcaggctggcaactcaaggaagagttgacattgcagtcctggggtagaattacctctactttgggaaacctcagtctttgctcttcaggcctctcagctgattgtgtgaggcccactcacatcatcgaggatgggtctctactttatttcaagtccactggttgtagatgccaaccacagctacaaaatgcctccacagcaacacctagactagggtttgatggagtcactggggactagaacctggccaggtgacacataaacctgaccatcacagtggtctaatcagtagggaagctgagggagaactgggacttagaaggtgcagggcctgaggcccctgggggttctagtggctgcagtcaggtcccacctctcttgcccttctctccctttgttatggctcctgcctaggctgacctacttcaggaaaaggctacctcccgtgtctggggactctggatgggggaggtaggatacgctctccagagaatcccttctgaaggtgtggtatggcctggattgctagcacctaactctgttgtggccactgttggctctcggaccctgtgccaatccctgtttcttcatagaaatgatggagggtggaccccacccttctccccatgggctaaatatggagattcatgagccagagcagttctcacaggcaaaggcacggaattgtatctcttctcctaagttgcttacagagtagcagaggagaaggccactgacctagccagcaagatacaatagaaacagaaagtactgtgtccaaggcctcagcctagagagggagtctcactccacccccagatctgactatatcttccttgagctcctgtttccggaagaggtgattttctgagtgtgactcctctgttcctggcaccctgtgcatccttagccatagcttacaagagaacagctggttgtgatggcaggaggccctcccaacaccaaggcggagatggaaatgtccctggcagaagaactgaatcatggacgccaaggggaaaaccaagagcacctggtgatagcaggtgaggatc

SEQ ID NO: 44682 - DNA, 2300 bp, Homo sapien
ggcagccagagagtaatgtccagttggaagttggaaggaaagcctgaagcttagcagagaggtcttgttgtcacctgtacctttgttagtggatattagatgccatctgtacttttgtgattcagtgcataatgtgtcttctttctcgggcaacttttacgatttccctattatcagtggatgtgggcactttgatactcacatgccttggtgtagtttccactgacgctttgccttttgttgttgctgttgctgctattgttgttttctgattgtcttttctctctgtgctacattgtggatagttttattgtctaaataaatactgtaaattcattttaaaataagtttgtctgtatgttcactaattccttcttctgcaatatctgatcttctgttaatcccatatagtgtaattttcatctcaaatattgtagttttcatctttagaaatttgacttggatctttttatatatttcatggccctgcttaactttttgaacatatagaatatagttgtattagctgttttcatattcttgtgtactaattgtacatctgtgtcaattctgggtttatttcaattgatagattgttgcctcctcattattgagaatttatttgcatggctgataatttctgagtggatgccacacattgtgatttttactttgttgggtgctgtgtgtttttgtatttctagaaacattcttgaggcttgttctggtgtgaagttaatggaaagagtttgatccttttgggtcttgcttttaagatttttcagtaggactagaacagtgctcagtgaaaggaccagttattcctcatgagtgaggcaagccccttctaggcactctacccaatagcccatgaaccactaggtttccagtttgactggtggcatgagacactattccaggccctgtgtgagagctgggaactgtaatgcctaatttggggggatggttctttcctaagctgtgggtaaccccctcatcagtgtgtgcaaataagcactcagatgaatacttgggacagactctttgcaggtctccagagctctctctgtgcagctctctcctctgcagtaccctgttctgcaaactttagctgctttggtctcctttcattctgttctctgtgtccctaacccagggagtcatccatcaagttccacctgcattcccctctgtgccatcgtctggaaactctcacaaaggagtaatctggggcagtcaccagattcacatttggctcctgtctcttaggaatagctatcctttgttgcctaacgtttatagtcttgaaaactgttgtgtcgcatattttttctatgtttggttgtttcattctggaggaaaaatatgatccctgttaccccatgttggctaagaggaaaagtgttgcatgttcctttaaaatcaaataattgatatagcagaatcttatgctgtgcaatgaaagtaaaaagagagggagtaatggactgggaaaaatgcagggaccatgcatagactactcatttaaaacttatttattgagcacctactatgttccaggcactgagaaaaggtggtagctttgattaacgtggtaatggtggagataaaaagtgattggataagaggtatgttttgaaggtagagcccatatgatttgcatatatgtagagtccatggggtatgaaaaaaagaggagtcaaggatgatgctgaggtttgtgacctgagtaactgggagtatggctttgcctttactgagatgcagatgattatggaaggataagcttttgaggggaagataactcacttttggacatatggagcctgagatgcctattcaaaatccaagtggttatgtgagggaggtaaattactatccatgggataggttgaactggtgttaagagtttgcaagtcatcaacatacagacgtatttaaagccatgagactggagaaggaggtgatgaagagagaaaagacaagaagtccattgaaggactgagtttgggacactccgacatttagagttggagaagaagaggaggcctcttcaaagaacactgagaagtggccagtgaggaggaggagaacgaagggagtagactctattatttcaagaaagatggcgtggataaactgttagatgctgctcagaaacacaatagaacatggacagagaagtgacttgggataaatcgtgttcctgtctatctcttactctgggaccaccactgagctcgagactgccagacacttctttctaaactcagcacccagcaaaggacctggcacatagt

SEQ ID NO: 44683 - DNA, 2300 bp, Homo sapien
attgaaagagaacatacatttcctaaaatcaacagcaaacaaatttaagaagttcaaagaattatcattaaaggcaggaacacgaagtagatgtaggctattatctctacgttttaaatcatcattgagacacaaagtcagagctataagtatcataataaataaggggcatgaatataggaaaaatacataatgtttagtgataatacccttatcattcttgaaaattcaaagaaaaaggcatgtggaatattcaagtcaatgggttttcagaatgaggtgtacaacagattactatagcaaaatcaaattctctgccacacaatagcaataactattagagttaattaatttccattaattagaacaattaatagaaaatatgccatttgcaatagcaacaaaatccaagaattaccaaaaaagaagcctaagaaaaatgtgtaaggtctttctagaggaaactatcaaagtatactgacagattcaggtaaaaggagtttgaaataagtaaaggagcataacctattcattgatcaggagcagaacattgtaaaaatgtcaattctgcttaaatgatttacaatttagtgtcttacctgtagctgccaaaaattacagtcacacttaggctgctgttctctggttcccaaatcaactctggaaaattatagaagagaaaaagaaagaaagaaaaaacaacaatataagcaataaaatctaagcaacaaaacacagaaagtcctgggtgagactgaggactgtgttgaactggtacttatgtttggggcggtgtcagttggaggggggttggctgcagggatgttgaagtctatagcctgcctagacgtcagatgacagaatgaataggatgaacattttaaaatctccacctcactgcactgcacaatctgaggcagcacctcaaaacacgattccagtaaccctagggtaatagcaggacagcaggaaaattgggttggttaaggcagtatggttccggagatctgctaattacaacctgaaaccaacttagtggatgaggattagcattattattattattattattaatattattattattattattattgagactgtcgcccgggctggagtgcaatgactcgatcttggctcactgcaacctccgcctaccaggttcaagcgattctcctgcctcagcctcccaagtagctgggattataggcgcccaccaccacgcccagctaattttttaattttttttctatatttagtgaagacagtgtttcaccctgttggccaggctggtctcgaaaagaattattttaacagaacataaacaatggaatagaagttgaatagggtatcagagtgaatcatgcaaactaagggtaggtattctttcatagaaataaatatatatgttgctacctatatatatccttggaagatatgtaaaatatatttctttgaggaaaaaaggtttccaaagtccagctctggctggggaggagcccccgtgggaaggcgtgcatcttctcacagaggtcactacaataacgggtgctgcagccacccagggaacacctcgcctggtacccgcagccattttctgcaaggggtacagctgggcaaatgctcagaggtgagagaaaaagagcatctccaacccatcacttcaacaaagagccaggacccaggaagaggaccctcctgagtgaagactgagggtaaacccccgctcaaagaggggccacagaatccagcttagtccctcctgtcagccctggaagaccccagcggctttgtcgcccaaggacacctctccccccactgtgacctcaggggactaggagtcagaaccttggtctgaggggagcagacaccatccgcagagaacaggggtccaggctatgccaggaatcaaaggactgaggggcacgcctacctcaacccctaaccccaggacctctcgcctcctcccccaccccaactcccaccctggccgaatccggttccacccctgctgtcaacccaggtggcccggatgtgacatccctgacttgcgcattggtctgaccagcaactcgagatccacggagggaagcaggcgcaggctctgtgaggaggcaaggtgggggcaggctgtgccaggcgtcaaagtcaggaccctaagagagagctgagggttccccacccccattcctatcccccaccccattcccattcccttccacactcctaacccaatccacaccctcatcccctaccagcaccccatcctccccaaccccgtgccaccctcatacccccat

SEQ ID NO: 44684 - DNA, 2300 bp, Homo sapien
aacaattaatagaaaatatgccatttgcaatagcaacaaaatccaagaattaccaaaaaagaagcctaagaaaaatgtgtaaggtctttctagaggaaactatcaaagtatactgacagattcaggtaaaaggagtttgaaataagtaaaggagcataacctattcattgatcaggagcagaacattgtaaaaatgtcaattctgcttaaatgatttacaatttagtgtcttacctgtagctgccaaaaattacagtcacacttaggctgctgttctctggttcccaaatcaactctggaaaattatagaagagaaaaagaaagaaagaaaaaacaacaatataagcaataaaatctaagcaacaaaacacagaaagtcctgggtgagactgaggactgtgttgaactggtacttatgtttggggcggtgtcagttggaggggggttggctgcagggatgttgaagtctatagcctgcctagacgtcagatgacagaatgaataggatgaacattttaaaatctccacctcactgcactgcacaatctgaggcagcacctcaaaacacgattccagtaaccctagggtaatagcaggacagcaggaaaattgggttggttaaggcagtatggttccggagatctgctaattacaacctgaaaccaacttagtggatgaggattagcattattattattattattattaatattattattattattattattgagactgtcgcccgggctggagtgcaatgactcgatcttggctcactgcaacctccgcctaccaggttcaagcgattctcctgcctcagcctcccaagtagctgggattataggcgcccaccaccacgcccagctaattttttaattttttttctatatttagtgaagacagtgtttcaccctgttggccaggctggtctcgaaaagaattattttaacagaacataaacaatggaatagaagttgaatagggtatcagagtgaatcatgcaaactaagggtaggtattctttcatagaaataaatatatatgttgctacctatatatatccttggaagatatgtaaaatatatttctttgaggaaaaaaggtttccaaagtccagctctggctggggaggagcccccgtgggaaggcgtgcatcttctcacagaggtcactacaataacgggtgctgcagccacccagggaacacctcgcctggtacccgcagccattttctgcaaggggtacagctgggcaaatgctcagaggtgagagaaaaagagcatctccaacccatcacttcaacaaagagccaggacccaggaagaggaccctcctgagtgaagactgagggtaaacccccgctcaaagaggggccacagaatccagcttagtccctcctgtcagccctggaagaccccagcggctttgtcgcccaaggacacctctccccccactgtgacctcaggggactaggagtcagaaccttggtctgaggggagcagacaccatccgcagagaacaggggtccaggctatgccaggaatcaaaggactgaggggcacgcctacctcaacccctaaccccaggacctctcgcctcctcccccaccccaactcccaccctggccgaatccggttccacccctgctgtcaacccaggtggcccggatgtgacatccctgacttgcgcattggtctgaccagcaactcgagatccacggagggaagcaggcgcaggctctgtgaggaggcaaggtgggggcaggctgtgccaggcgtcaaagtcaggaccctaagagagagctgagggttccccacccccattcctatcccccaccccattcccattcccttccacactcctaacccaatccacaccctcatcccctaccagcaccccatcctccccaaccccgtgccaccctcatacccccatccccaattcaacccccgcaccctcatcccccaccccacacctgcacccccaccccccaacacccatacccccatccaggcaggatccccggttccgcccccgctttcaaccaaggaaagccccagctgcccggatgtgatgccactgacttgcgcactgggggttagagacaagcgagcttctgcgtctgactcgcagcttgagactggcggagggaagcccgcccaggctctataaggagacaaggtgagatgctgagggaggactcaggaggacccccaccccacatagacgaccacaaaaaatccaacaccacccctgctgccagccctgggccactcctggagacttctcagtctgtggtg

SEQ ID NO: 44685 - DNA, 2300 bp, Homo sapien
cccacccccatccacgctgaatctgatttccgcttcctctttcaacccaagaaagccccaggggcccggatgtgatgccactgacttgcgcattgggggttagagagaagcgagctgctctgtctgaccagcagcttgggattggcggagggaagcgggccaggccctgtgaggagtcaaggtgagacgctgagggaggactcaggaggcccccaccccagatagacgaccccaaataatcccgcaccactcctgctaccagccgtgggccacccgtgggcggacttctgagtctggggcgccctccaccccactgcgtctgaagtcgcatgggactctggagtccgagcttggggtggttagtgtaagactagtgagggcaggctctacgaggcatcaacctcaggaccctaagagagggccaagcgtaccccacccctatttctatcccccaccgcctcccctttcccattactatttgcactcccaaacccatccgcgcccctatcccccaccagcactcctatcctcaaccccgcacctctctcacaccgccatctcccaccccaaaaactggggcccctccaccaacctcacccctcccacccccatggatgctgaattgggttgcgcttccgctttcaacccacccccaaaaacccgccccctccaccgacctcacccctcccacccccttccacgctgaatcgggtttccgcttccgctttcaacccaagaaagtcccaggtgcccggatgtgatgccactgacttgcgcattgggggttagagagaagcgagctgctctgaccagccgcttgggattggcggagggaagcgggccaggccctgtgaggagtcaaggtgagatgctgagggaggactcaggaggcccccaccccagatagacgaccccaaataatcccgcaccactcctgctaccagccgtgggccacctgtgggcggacttctgagtctggggcgcccaccaccccactgcctctgaagtcgcagaggactctggagtcagagcttagggtgtttagtgtaagactagtgaggccaggctctgccaggcatcaatctcaggaccgtaagagagggctaagcgtaccccacccctattcccatcccccatcacgtcccctttcccattaccatttgcactcctaaacccatccgcgcccccatcccccaccagcactcctcctcgaccccccacctctgtcataccgccatctgccaccccaaaaaccggggcccctccaccaacctcacccctcccacccccatccacgctgaatcgggttccgcttccgctttcaacccactcccaaaaacccgccccctccaccgacctcccccccacccccatccacgctgaatcgtgtttccgcttccgctttcaacccaagaaagcctcaggggcccggatgtgatgccactgacttgcgcattgggggttagagagaagcgagctgctgtctgaccagcagcttgggattggtggaaggaagcaggccaggccctgtgaggagtcaaggtgagacgctgaggaggactcaggaggccaccaccccagatagacgaccccaaataatcctgcaccactcctacctgccgtgggccacctgtgggcggacttctgagcttggggcgcccaccaccccactgcctctgaagtcgcaggggactctggagtcagagcttggggtgtttagtgtaagactagtgaggccaggctctgccgggcatcaatctcaggaccctaagagagggctaagcgtaccccacccctattcccatcccccaccacgtcccctttcccattaccatttgcactcccaaaccatccacgccccatcccccaccagcactcctctcctcttcaaccccccacctctctcatatcgccatctcccaccccaacaacccgggcccttgtaccaacctcacccctcccacccccatccacactgaatcacgttccgcttccgctttcaacccacccccaaaaacccgccccctccatcgacctcacccctcccacccccatccacgctgaatctgatttccgcttcctctttcaacccaagaaagccccaggggcccggatgtgatgccactgacttgcgcattgggggttagagagaagcgagctgctctgtctgaccagcagcttgggattggcggagggaagcgggccaggccctgtgaggagtcaaggtgagacgctgagggaggactcaggaggcccccaccccagatagacgaccccaaataatcccgcaccactcctgc

SEQ ID NO: 44686 - DNA, 2300 bp, Homo sapien
aacccaagaaagtcccaggtgcccggatgtgatgccactgacttgcgcattgggggttagagagaagcgagctgctctgaccagccgcttgggattggcggagggaagcgggccaggccctgtgaggagtcaaggtgagatgctgagggaggactcaggaggcccccaccccagatagacgaccccaaataatcccgcaccactcctgctaccagccgtgggccacctgtgggcggacttctgagtctggggcgcccaccaccccactgcctctgaagtcgcagaggactctggagtcagagcttagggtgtttagtgtaagactagtgaggccaggctctgccaggcatcaatctcaggaccgtaagagagggctaagcgtaccccacccctattcccatcccccatcacgtcccctttcccattaccatttgcactcctaaacccatccgcgcccccatcccccaccagcactcctcctcgaccccccacctctgtcataccgccatctgccaccccaaaaaccggggcccctccaccaacctcacccctcccacccccatccacgctgaatcgggttccgcttccgctttcaacccactcccaaaaacccgccccctccaccgacctcccccccacccccatccacgctgaatcgtgtttccgcttccgctttcaacccaagaaagcctcaggggcccggatgtgatgccactgacttgcgcattgggggttagagagaagcgagctgctgtctgaccagcagcttgggattggtggaaggaagcaggccaggccctgtgaggagtcaaggtgagacgctgaggaggactcaggaggccaccaccccagatagacgaccccaaataatcctgcaccactcctacctgccgtgggccacctgtgggcggacttctgagcttggggcgcccaccaccccactgcctctgaagtcgcaggggactctggagtcagagcttggggtgtttagtgtaagactagtgaggccaggctctgccgggcatcaatctcaggaccctaagagagggctaagcgtaccccacccctattcccatcccccaccacgtcccctttcccattaccatttgcactcccaaaccatccacgccccatcccccaccagcactcctctcctcttcaaccccccacctctctcatatcgccatctcccaccccaacaacccgggcccttgtaccaacctcacccctcccacccccatccacactgaatcacgttccgcttccgctttcaacccacccccaaaaacccgccccctccatcgacctcacccctcccacccccatccacgctgaatctgatttccgcttcctctttcaacccaagaaagccccaggggcccggatgtgatgccactgacttgcgcattgggggttagagagaagcgagctgctctgtctgaccagcagcttgggattggcggagggaagcgggccaggccctgtgaggagtcaaggtgagacgctgagggaggactcaggaggcccccaccccagatagacgaccccaaataatcccgcaccactcctgctaccagccgtgggccacccgtgggcggacttctgagtctggggcgccctccaccccactgcgtctgaagtcgcatgggactctggagtccgagcttggggtggttagtgtaagactagtgagggcaggctctacgaggcatcaacctcaggaccctaagagagggccaagcgtaccccacccctatttctatcccccaccgcctcccctttcccattactatttgcactcccaaacccatccgcgcccctatcccccaccagcactcctatcctcaaccccgcacctctctcacaccgccatctcccaccccaaaaactggggcccctccaccaacctcacccctcccacccccatggatgctgaattgggttgcgcttccgctttcaacccacccccaaaaacccgccccctccaccgacctcacccctcccacccccttccacgctgaatcgggtttccgcttccgctttcaacccaagaaagtcccaggtgcccggatgtgatgccactgacttgcgcattgggggttagagagaagcgagctgctctgaccagccgcttgggattggcggagggaagcgggccaggccctgtgaggagtcaaggtgagatgctgagggaggactcaggaggcccccaccccagatagacgaccccaaataatcccgcaccactcctgctaccagccgtgggccacctgtgggcggacttctgagtctggggcgcc

SEQ ID NO: 44687 - DNA, 2300 bp, Homo sapien
ctctttcaacccaagaaagccccaggggcccggatgtgatgccactgacttgcgcattgggggttagagagaagcgagctgctctgtctgaccagcagcttgggattggcggagggaagcgggccaggccctgtgaggagtcaaggtgagacgctgagggaggactcaggaggcccccaccccagatagacgaccccaaataatcccgcaccactcctgctaccagccgtgggccacccgtgggcggacttctgagtctggggcgccctccaccccactgcgtctgaagtcgcatgggactctggagtccgagcttggggtggttagtgtaagactagtgagggcaggctctacgaggcatcaacctcaggaccctaagagagggccaagcgtaccccacccctatttctatcccccaccgcctcccctttcccattactatttgcactcccaaacccatccgcgcccctatcccccaccagcactcctatcctcaaccccgcacctctctcacaccgccatctcccaccccaaaaactggggcccctccaccaacctcacccctcccacccccatggatgctgaattgggttgcgcttccgctttcaacccacccccaaaaacccgccccctccaccgacctcacccctcccacccccttccacgctgaatcgggtttccgcttccgctttcaacccaagaaagtcccaggtgcccggatgtgatgccactgacttgcgcattgggggttagagagaagcgagctgctctgaccagccgcttgggattggcggagggaagcgggccaggccctgtgaggagtcaaggtgagatgctgagggaggactcaggaggcccccaccccagatagacgaccccaaataatcccgcaccactcctgctaccagccgtgggccacctgtgggcggacttctgagtctggggcgcccaccaccccactgcctctgaagtcgcagaggactctggagtcagagcttagggtgtttagtgtaagactagtgaggccaggctctgccaggcatcaatctcaggaccgtaagagagggctaagcgtaccccacccctattcccatcccccatcacgtcccctttcccattaccatttgcactcctaaacccatccgcgcccccatcccccaccagcactcctcctcgaccccccacctctgtcataccgccatctgccaccccaaaaaccggggcccctccaccaacctcacccctcccacccccatccacgctgaatcgggttccgcttccgctttcaacccactcccaaaaacccgccccctccaccgacctcccccccacccccatccacgctgaatcgtgtttccgcttccgctttcaacccaagaaagcctcaggggcccggatgtgatgccactgacttgcgcattgggggttagagagaagcgagctgctgtctgaccagcagcttgggattggtggaaggaagcaggccaggccctgtgaggagtcaaggtgagacgctgaggaggactcaggaggccaccaccccagatagaagaccccaaataatcccgcaccactcctaccagccgtgggccacctgtgggcggacttctgagcttggggcgcccaccaccccactgcctctgaagtcgcaggggactctggagtcagagcttggggtgtttagtgtaagactagtgaggccaggctctgccgggcatcaatctcaggaccctaagagagggctaagcgtaccccacccctattcccatcccccaccacgtcccctttcccattaccatttgcactcctaaacccatccccgcccccatcccccaccagcactcctcctcgaccccccacctctgtcataccgccatctgccaccccaaaaaccggggcccctccaccaacctcacccctcccacccccatccacgctgaatcgggttccgcttccgctttcaacccactcccaaaaacccgccccctccaccgacctcccccccacccccatccacgctgaatcgtgtttccgcttccgctttcaacccaagaaagcctcaggggcccggatgtgatgccactgacttgcgcattgggggttagagagaagcgagctgctgtctgaccagcagcttgggattggtggaaggaagcaggccaggccctgtgaggagtcaaggtgagacgctgaggaggactcaggaggccaccaccccagatagacgaccccaaataatcccgcaccactcctacctgccgtgggccacctgtgggcggacttctgagcttggggcgccc

SEQ ID NO: 44688 - DNA, 2300 bp, Homo sapien
ggggagcgcgggacggggcggggcgagtgggaggagtgaaagttggagcccagcaaaagcctccgccccgcgctcagtgcggccagagcgtgagccgcgacctccgcgcaggtggtcgcgccggtctccgcggaaatgttgtccaaagttcttccagtcctcctaggcatcttattgatcctccagtcgaggtgagtctccatcccgggacccgggagcccttcgcgcccagctccctctccccgggagccgggacggctcccgggaccccagcggccccgcgttcctcgagccccgcgcccgctttgccccggccctaccgcgggctggccgagtcccgcgtcccctcgatgcgcgccggcctcggcccgcctcactgtaggatgggctcccggggtccttgagggggagctccaaaaggaagacaggacgccagaaggaagacgggactccagttcgcggattcccgctctcagaagcactgcggtggcctggtgacaagcactcctcggagtcttgcgcaggaacaggggagcggccccggggtgaccggccagggcaggcttcagctactgggggggccggaggtgcattttgagaagggggtgcgcgggctgagggagcttagctgcgccaaaaatgtgtgagtgttgcctcgtgtgttctctgctgctcacattttttttaagagtgcctactgagttccaggcactgcgccaggcaactctgacattacttgcttcccatgccgctgctcctgttggtgccagtctcaggcacgagctttggtttagtctaagggttcccgcaccagctatgccccctctccaccgctgacagcctcccacttccttaactcatccctagacaccctgctgggccttgggcagactggagccagaggccaggaatattattctcctctgaagtctgtggtttgggccgtagatttcaatccccttctcccctttcaggtttcccttgaacaaccatcttccctcacaccttctcctcgccctgagacttggctaggagggtcgtgccctggatttgtggctttttggggtggaagatgactgcttcgttttgttgttgttgttttgagatggttcctgctgtgtgtgaagtgtcacaaatttgcaagcttcctgatctgtggagctttctcgaagattccatggcactgggcttgtgtcttgtttgtctgttctggggagggagggtggcttctctccctaccccagattgcgttagctcatcagagaaggggatgtgtagctgcttgctggctcactggtgccctggagtggggctagcctcagcaggagcttgataaatgtctttctatgcgtgctagcaatttccagtcatccacatccctcaaaatgggatgtggactagttgagaaagctgacgtggtgactggctagggcaaaagatggctctggggtgggggaaataagaaggggtggtcagagaggaaaacagcagggaaaagggactggggaaatggaaactgcccttcaagcatagcaacctgtggtgtcaggaaagagctgaggaggtgacaatggggtgtactgggccacactgaaccagaagacctctccctggtccaggcttagcctcaaattagttgtgtgacttggggcacagtccttcctctatctgggcctcagtttgtccatctgtagaatgaaaaaaaagatctgatttagaaaaaaatccaacatcttttcttatgcgcccctcccccccccacttctcacaccaccaacagtcgactgtttgggagggggtagtgcagagattcaacttcatgctggaccattatgtctagagacatgtgaatgtctgaaaaactgccctggaaaatgccactattccaatgtgtgagtgtttttcaagtttttattctgtctagccccgaaagtgagcttaatggctggctggggaaaggtatgcattgtcagcagctctttaaccccaaggacctcaagatgaggttttgttttgtttgtttattgttgtgttttttttttttaactggcaaaagccaattttaggattaaagccaccttatgaccctctgatatcatttttattgcagacctagtctaggggcaggagggctttggtggtctcagtgctttcaggtttatttgtttgcctctgcacttttaaacttggggcagcggggaggatctcgtccatggatttcagacatctgggaggggctgcttcaggcgtttaggtggtcctgtctggcagtgctcagtctaccactgactgccagttct

SEQ ID NO: 44689 - DNA, 2300 bp, Homo sapien
tggatgagctatcccttcgatgaggtttataaggaagatggcaaagtatgattaatatcaacctgtaagagaaaagtgcctgggaatctctgatgagggagctgtaatcacttgcttcctttgtctgcctgggattcagtcgctcattcagcaaacgtaattaatgcctactggtcattggtcactgtgctcaacccaggggaatacaggtaaatcagacaaaccttcatttcccggaggtccaatgtcagtggaggaagagacatgcatacaggacacttcaaatcccaggctggctacagtaagggcagacatgctcctttccatagcagtctggtgttggacaggacggcaggcggatggactggcagccttctcttcctcatggcctcagcaaagccgcgtgtttgcctgttccctgctctgcggcatttctgcccagggcaaaactggctatataatttgcagggcccaggaaaaaagaaaaatgcaggtccacttgttcaaaaattattaaaaatttcagcagcaaagcatgaaagaaagtatggggctcttcccggtgtgtgtcggggggcgggggtgaggggctgtgcaagcctaaacatgtcctgcagtctcttctgtcttgcaccgtagtctgaaggcagccccaggtcctagtggactaactcagtggtagtaggacacacacagctgcacacaaatcagtgacacatttggttgagtgcctattgtgtacccagagctctgctaagtcttagggatacagtggagaccccaacagacacattttgtgtgtatgcatgtgtgtgtttgtccctgagcttacttcagtaggagagacccactgtaaacaagctcataaaaaatgcccaagataatcatcaatgagtgagcagtgttgtgaagaggacaaagcagagtgatgtgcttgggaggtggggtggtgaagagggtgttgtaggtgagtgtggtagagctaagcctcttcaaggatgcacacagccccttctggagcaacaggtgaggatgctgccagcgtctggcatcagcttggtacacaaatctttgccattccttctccttctgaagcaaatcagaagggtctagggaaagaagatgaagtccaagtatgcttgagactcttgacgtgtctcccctgaagtggggcactgccccttccccttccccctctgtgccttctcgtgtcttcttctgctatcacctggtgccaagtctccagaaagattcggccatccagtctcaaggaggtttccaaagcctcctctattccagttggtccctctcacactcagcttctggggccaaagcgggagccacattgtggcagtgcccccttggggttcagagaaaattctccagtgaatgtctccgcctggtcctctgttggcgggtcctccctgcccccaaatacctgggaatttgccctgtggaatacctcacatcagagcttgctggggagacccctgtctctcttcttctcggtgccaaggaaggtgctgagttacccggcttccttcatacgacaagacttgtattccgaaggactgaagattgtgggctgagagctgggaaaaccagagagggaggttgaagccaggacacttggggaagcaatggggtgcaacaggtggcggggaggaagccacggctggagagcacagtttgaccccgcggcgtgccagcgggcaggagggggtcgcctctggggcgtgagcacatccagccccacatcttgtccctgaagcagctccctgccggccacagcctggggcgcgagtttcccccgcccaggccccgcgccgcgggctcgccgcctcctccctccgcctcccccgcccctggctgtctggcagcgccgcagtggcggcgtggggacggggggcctcagcaaccgggctcccgcctccttcccgcgcccgcgcgagcctccccggctccccaccgcagcagccgtcacgtcgtcggagatttccatcggggcgggcctggggcggggagcgcgggacggggcggggcgagtgggaggagtgaaagttggagcccagcaaaagcctccgccccgcgctcagtgcggccagagcgtgagccgcgacctccgcgcaggtggtcgcgccggtctccgcggaaatgttgtccaaagttcttccagtcctcctaggcatcttattgatcctccagtcgaggtgagtctccatcccgggacccgggagcccttcgcgcccagctccctctccccgggagccgggacggctcccgggaccccagcggccccg

SEQ ID NO: 44690 - DNA, 2300 bp, Homo sapien
acgcccatcctaacaataagaagcctccatatattctatcaaatcagaacttttattgaaccattcagaaagctgggtttgcaaggcagtcaagggaattaaattccaaaggatgacgatccctccaaggagagacaggacacacaaactaaattttggcagaaaacaggagtaataggcatcatagaagcaagtaataagaaatcagctaaacttttaatgaatttctaaagcccaagtgtggcttatcatctcggtttagactaacttggagtccccgatatagaaaagttcttactcacttaaagtctcttctttacttccactgggcacaagtaagaataactggcccaacagcaggagattgagagaggccattcatgaaggagcagcaaaccatctcaatcctaggaactctagcggagggccaaaagcaaaatctgtgtgcctgggggtgggtggggtgggtggtagaaaaccttttttttctaccttcaaacacgatgaaaggtctgtagcttctgagggaagggtgaaagcaaaagccatctgcccatgggggaggggcagacaaacctttggggctgtatcccgcatcaatacaaagcagagttctgttatcagtgtaaatggggcaagggcaagtactttcttctgtttgagaccttccaaagatacagggcaaagtttgactgccaagagagggagacaaagaaatgctaaggagacctcacctcagaaaactagacatacaggttctgaataagactgaggctgcacgaaaagaaccaaggaccccagctgctgcgaccacaaggtcaacatgaaataaagggcagcagtagtctaccactagggagtgggggtgtgggggggagaatgcagattgagagccccatcgtgacaccattgtattaagattgctaaaagctgagaaaggagcagaaacactgaggaaaactctacagtgtcaccctcttcacagtacacacaaataacagtttgatagtggaagattttggagctggtaacaacaacaaaatcgaaatctaagtaacctaccgtaccaactaaattgactaacacactgatatccagcagaagaagcagatgtcaatttctagacataaatgctagttacctactcacctgtactgttcttctacaaatgatgtctggcattaatttaaaaattacaaaaccataaaaagtcaagaaaatcaaaccattcctacgacaaaaagcaacgaacagaactggactcaaagatgacccagatgttggttatataagaaagaaactttaaaataacgacaattaatatgttaaagaatctattgggaaagtttaatattatacgtgaagagattggcaacttcctaagaaaaaaatgtaaactataagaaagaatgaaattgaaattccagaattaaacccagtatctatcaataggctcattgacagaataaacaccatagaagaaagacagaataaactggagatgtcaacagaaattattcaaaataaaacacaaaaagaaaagaagtgaataaaacgcaatagggcattcaagaatgataggacaataactaattgtctagagtacacatcattggagttataggagaagagagaaaagagttcaagggtcaaagatacatttgaaaagatgatggccaacaattttccaaaattaatgaaagacaaaaatccaaagatccacttagctcaaggaacactaaataggagaaaaaagatagctagtactccaactgaaaaaaatcagataaatataaaatctccaggacaataagaagaaaaaaatacatacagagaaacaaagataagaattacagcagattctcatacaatatgtaacctatttagcttggctttttaaaaaaattcagcaaaaactatcatactgaatggggaacaactggaagcccttcctctaagatctggagcatgacaagaatgtccactttcaacatagtactggaagtcttagctagagcaatcagacaagagaacaaaaataaagggcatccaaactggaaagaaataagtcaaattatccttgtttgctgatgatataattttatatttggaaaaactgaaagactccgcaaaaaactattaaaactgatgaattcagtaaagttgcaggacacaaaatcaacatacaaaaacaagtagcatttctatacgtcaacggtaaaaagaaataaaaagtaacccatttacaatagctacaaataaaattaaatacataacaattaaccaaagaagtgaaatgt

SEQ ID NO: 44691 - DNA, 2300 bp, Homo sapien
gaagaaggcagcgtccaggctctgccaggcattaacatcaggaacctaacggagggctgagggcccctcttccctattcccatcccctaccacatccccattcccatcttcattcccaaccccatcatcacccccattccccaacagcaccctcatcctccccagtccccaccatcttcatccctcccccatccccaccctcatctccccaacccttacccctctatagctccatcctggcagaatctgggtcttcccctgctgtcaaccccgggaagcccctggcctggatgtgacgccactgatttgcgcattgggggtcagagagaagcgagcttcttggtctgacaggcggcttgggattggaggagggaagtgggcccaggctctgtgaggaggcaaggtgagggctgagggagggatcaggatgcccccaccccagatagagggccccaaataatccagcttcgcccctgctgccagccctggaccatctaggggcaaacttctcagtcagggccaccccccagcaccctgccaaccctgccacttaagccgcaggggactctggagtcacagcaggtctgcttaagagagggcagggcccaggctctgccaggcatcaacgtcaggaccctaagttagggctgaaggccccccacccccattcccatcccccactccatccccatttccatctacactcctaaccccatcccccatgagaacccccatcctccccaggccccactactctcatcccaccccacccccaccctcatctaccctaccctcacccccctatccctacattctggtagaatccggtttcgcccctgctttcaaccgagggaatccccgggtgcccggatgtgacaccactgacttggcgttgggggtcaaagagaagcgaagttctcgctctgagtggcggcttgagattggtggagggaagtgggtccaggctctgtgaagaggcaaggtgagactctaagggaggactcaggaggcccccaccccagatagagggccccaaataatccagcactactcctgctgccagccctaaaccacctgggggcggacttctcagtctgggccactccctgcaccctgccagcccctgtggcttaagccgcaagggactctggagtcagagcttcgtgtgaccaaggcagggctggttaggagagggcagtggccaagctctgccaggcatcaacatcaggaccctaagtgagggctgagggcccccaacccccattcccatcccccaccccatccccatttccatccccatccccacctccatcccccaccagaacccctatcccccaccagaaaccctatcctgcccactccccaccacgttcatccctactcccaccattcccatcttccccacccctgaccctcctcctcaccctcccacccccccacaccctggcagaattcggttctgctcctgctttcaacccagggaatccctgggtgaccagatgtggtgccactgtcttgcacatttgaggtcggagagaagcaagggcctcgctctcaggggcagctggagatcagctgagggcagctggccctggctctgtgaggatgcaaggtgagatgctgagggaggactaaggagtatcccacccctggtagtggaccccaaataatccagtgccacctctcctgctgctagctctggaccatccagggcaggactccttaggctgggccacccccagtcccccaccgcttaagccgcaggggactcaggagacagagcttggtatgaccagggcaggactggttaggagaggacagctcccaggctctgccaggaaacaacgtcaggaacctaagggaaagctgaggctacccccacgccaaactctattcctgtccctacctccgtcccccacctacaccccccattcccccaccccatccctaccggcacctctatcccacatcccccacccctatcctggcagaatccgattctgcccctgatttcaacccagggaagccctagggggccggatgtgatgctgctgacttgtgcattgcgggtcagagagaatcaagggcatggttctgagaagccgactgagatcagcagaggggaatgggcccgggctctgtgaggaggcaaggtgagacccccgaggaaggaatgaggaagccctcacccagatagagaaccccaaataatccagtactacctttgctgccagccctggaccacccagggcagacttctcaggctggaccttcccccctccccactgccacttaagcca

SEQ ID NO: 44692 - DNA, 2300 bp, Homo sapien
acattagaatagaacttgcattacttaaaatctatagcaaacgcacttaaatgtgaaatgttataagaatttccataaaagccaggaacaagacaaaaatgtatgctaccttctctactgttcaaaactgcactgaaacacatagccagagctatgggtatcaaactaaataagatgcatgaattttgaaaagagagatgtttggagacaatgttatctttaacgaatagtcaaaggaataagcatgtggaatatttaaatgaataaaagacttcagaagaaaaatgttttatggaagctcattatagcaaaatcaagaaactggtcataaaaaaacagtaaatagaacatacaatagaaaatatcccattaaaaacagcaaaaaactcctaaaattaccttaaagataatcctaacaaaaatgagcaggatcttactggagtcaactgtaaaagtttgctgatagattcaggtgaaagaagtcccaaataaataaagcattataccatatccattaatggagaacagaatattttaaaggcgtgaattttccttaaattatttacagaattagtgccttacctttaggccaaaatgagcatcaagttcatattgctgacttacactccagaatcaatcctggaggggagaagggaaaaaacattatcaacactcaacaaattctacacagcaaaacatgatagaaccctaagcagactgcagaatttcgaattggaccttgtgtttggagtagggggagtggaggacaacagtgcatttgcggaggtccgcagcctgcatagacggcaaataagaggacgagtaggaagaaatatttgaatttctggccctgctttattgcacaatctgaggcaacacttcataccacgatgccagtagcccagtagctctggagtgatatcaggacagcaggaaagacggggttgattgagggagtatgactccggagtctatgctgctaaccacctaaaaccaccacagtgacgactggtcttagttgatcctctgctacaagttaataattctttatattaaattttcttgctcagaaaaaaagagaaaaattattataatagaatataaagaatagaccagaaatagaataagcagtgaaccacacagcgtaaggtaggtattctttcatgaaatgttatatatgtattcaatatacacttggcagacatttaaaacacatatttttactaggaatgagggttagaaaaccagacatcactgcattggactataaaatatcagctaaactcaaaacagcaggacctctccacaccccgatgctcagcctctttcttgtagaaaatataccctttaggacaaaaagtttgccaagtctacttgtggcttgggaagagccccgttgggaaggtgtgcgtcttctcccataggtcattacaatcacgggtgttgcagctccccagggaccatctggcctgggaaccgcacccatgctctgcaagggatgcagctgggcaaatgatcagaggtgacggaaactgagcatctcccacccatcacttcatcaaagagacaaaagccaggaggaagaccctcctgagtgaggaccgagggtccacccacccctcacaaaggggccacagaatccagctgagcccctcttgtcagccctggaagaccctggcaatgttgtcacccctaccacaaccctcccctcactgccaccttggaagactccgagtcaagagacctggtttaaggggagaagacatcctcagcacaaaacaggggtccaggcttttccaggcatcaaggtcgagacactgagggatgactgaaagaccccacccccacccccaccacgacccacagccccaagatccccatcccagttcccacctccacgcccctccccacactcatcttcaccaccacccctgccccaaccccatcctcacccgtaccccaccccacccggactcccaccctcactcccaccccaactcccaccccagttccggcagaatccactccgcccctgctgtcaacccagggaagccccggggaccggatgtgacgccactaacttacgcctcggggatcagagagaagcgaggttctcgttctgagggacaggcttgagatcggctgaagagagcgggcccaggctctgtgaggaggcaaggtgagaggctgagggaggactgaggacgcccccaacccagatagaaagccctaaataatacagcgctgcctctgctgccagctctggaccacctgagggcagacttctcaggctgggctgt

SEQ ID NO: 44693 - DNA, 2300 bp, Homo sapien
tattacagaacagtgggaatgaatgaattattcagtgtttggtgctatgaaacaattggcagggaaaacaatttagaaaattacctcacactacacagcaaaataaattccagagggattaaacataagcaataaaaactaaaacaaaattcatttaagcacttatccaattttgaatgaggaagaaattcttaaacacgaattcatcagaagaaattacaaatgaaaagataaatataattacataaaattaagattactatgcataaaagtcaatttaaaatgtaaacttttaaatgtaaacatttaaaatgtaagtgggagaatattttccctacatttgacagaaagaggtctaatgggtcaactaaacatacattgcccatacaaatttaaaaaaatgtaagttcttaatggaacatgtacaaagatcataaatagatgtttatagaaaggaaacaaaattaatcaagaaatataaaaaagtattcaatctcattataataaaagaaacacgtattaaaacagtaaggtaccattttgcccctaacagatcggtaaaaattttaaaagaatggcaatggccagcactgtcatgggtgtatgagcagtaatcaacaatcttatacagtagagtggaacaccttcacatagatatcaagagcctttaaaacgttagtatcttcaggcccagtaatgtctttcataaaaactcatcttaataattcattcaacaaatatttagtaagtatctacaatatgtcagaccttattgtaggttctagcggatataagagtgaacaaaatggagaaaaaaatccccgggcttgagggacttacaccctaaaacaggaatccaaacaatagatgtaatgtatctagtctatcaggtgatgacacaaaccaaaggtttaaaaaagtaaagcaagaaaggggaagagtgagtgttggaaaagatgggtttgcatttttatgtgagatcatttagaattcaaatgtgacatttgaataaagacctaaaaaaggtgaggttcaaagaagcaaaaataatttaaacgatcaatatgtgatctgtcatacaattatggtagaaattgaaaactgaaaagtatgcagccattaaaaattgtttgaaggctgctgaccgatgtggggaaatgctcacaatataataccaatgaaaaagccagatcaaaaatagtacatataagatgtgatcccgattatataaacacagaaacacatctgaaaggaaatacagcaaggtatctctggactagggatttagaggtgattttttttttaaatgtctcttcattttcaaaattttctgtaatgcggttgttttacttttataatcaggaaaaaacaatgtaatggtagatattacaatcttaaggtatattagaaaatatactcaattttttaaatggaagtgctagccatccatgcttaaagtactgggtcccgttttggacatcatatattaagagggacactgaagatagaagtgtctactgtataagtttctcaaaatatatatcacataagctcaagaactagcaatatatagactgaagaaaagatgagaagaacaaccatggttaaacatttgaatggccactacaaggaaggggaacagcaattacacagtatagctattgctccaaggtgcaagatcaataggttgaattcagaagacagattgcaggtcagtatgaagaataacttgctaacaaccaagctgtctgttatctggtggtgttaagcaacctttcctgaaaccattcacactgaaaacagatgaccatatgtactgggtgataagactgccatcacatgattgttaagggccctgccatttctgaactcctcttttactattttgaaaggttattttatgctatggtcacttacataattccatctccatccacctccccttcccttaaaaactatatataatacttgtgtgtttttttttttttgtttttttttgtttgtttgtttgtttttttttggccgggcgcggtggctcacgcctgtaatcccagcactttgggaggccgaggcgggcggatcacgaggtcaggagatcgagaccatcccggctaaaacggtgaaaccccgtctctactaaaaatacaaaaaattagccgggcgtggtggcgggcgcctgtagtcccagctacttgggaggctgaggcaggagaatggcgtgaacccgggaggcggagcttgcagtgagccgagatcccgccactgcactccagcctgggcaacagagtgagactccgtct

SEQ ID NO: 44694 - DNA, 2300 bp, Homo sapien
accagaagctggaagagacaagaaatcattctctagaacttttggagtagtttgaccctgccagcatctcgattttagacttctgaccttcagaactgtgagacaataaatttctgttgttttaagctactgaatttatggtaatttgttatggcagccctagaaaactaatacagcaaccttaatatttctttttgccagtatactaatctattaaatccaatggacatttatgcaaacaaatctacacatgaaaatgggtacctatgcaggaaaaagtatttatagctttatgctcacatacacacttgctttatgtgcaagttacatgttaattttgtagagaaaaatactgtacctgcagtcagcaatctgagtactggccttgattctgccactgactcactatgaccttgtgtgaattatattttctatttagtctagtttctttttctgtacaatgacatggttatctttatgggtccctttagctcagtgactctaagcttacgagtacctatctatcttctactcaatgtatggacacatgcttttgaagatgtataggagtgtagcacatgtacttcatttggcaggagtagagagcattagaaatttgggggaaaaaaaccaacaggatggtagtttaaagagaaatggcacactatgggcaacattgtaaatgcctattatgtcccagtcactgtatgtatattgacactagtatacttaaacacactatataactcactttcaattagatgccctctgaatttttctaacaggactagaaatcacaatatgaagagtttgactaagaaaacttttatactaatcattatatgtaagcagatgctgaattctttgataggaacagctctttattcacgtgcttatattggtattatccctgaaacacaaaagatggaatgttgaatcaatgtgatttggagtcgcatttggggactcacctttggagaacttttgaaatgtggcagtttagtttttattttctaagggccaacttctcctttacctggaattttcctgtctttagattcctagactgttagttctggaagggtcttttaagatcatctatttccattaccattcatttggtcactgaggatattgagggccagattgaagaactcgttgaaagcaacacagcaattttcagaggcagaactcaaactcaagttcctttattttatttttagcctaggtctttttccactctatgctgcattgttactgtgctttgcctaggttgctttttttcttttgacccaatgggaatatagttcttttatactttgagtcaataattatccttctccccaccttagtccttgtgcaactcatgtataggctcacacaattacatacatctatattccctttggaatttttgaaaagaaagcattgtggttctgctgcttgtctgtcttacctacagggaagctagaactgatagttttgaattgggtctgcacttctacttggttgagggtgggggtggaagttaggtcaacaggggatcaatgtggcggaactctttcttcttagtggagtatgaatgacaacccctttgatgtacatttttctagctcattattgtccccagagatggaatctgaacagacaggattgtcaaacctttatttgcagcctgggttagaaggcacgcccataaggatataagggagacagagggaaaaaggaggaagctcactcttcagtctcggagcagcaagtaagcatcacacatcagctacagtaacccatacttcctttatcctcctattcgctcatacccttttgctctctttctcttccctttgctgcctctgctcctccctttctctctgggcttccctctatttctctgttggatgccttaaggaataaaatactactttagtatttcgtaaaacaaccacatctaaagccttgcagtactgtattcagagccccagcacagccgcgtgctaagcaccagtggtgaacctaaagccagcaaagggggaggggagaaggggaggggaggaggggagggagaaactgacagagagggagggaggcagattgagagagagagagagagagagagagagagagagagagagcgagagagcgtgagcgcgcgcaagctagcgagcaaaccagagagacagaccgagagagggaccaggagagagacccagagagagaagaagaagccagaagccgagctctgtcagggctcaacctccaacttgtttcagttcattcatccttctctcctttccgctcag

SEQ ID NO: 44695 - DNA, 2300 bp, Homo sapien
atcccacattcaaacaaatctgctcccacctgctggtggttgctagaacttccagtcaaagctgacttagactgaaaacgcactcttctcgaagtaagcagacctggaaatgtggtttttagttttggcctctgctactgtgtgaccttgggccaatccctttttcttctctgggcttcagtttccctacattacaaccgaggtggctggacaaaatgccccggaatggctctaacatttttggcaaacaaggattttctctacaaggacgtctgtgtgaccagaggtgatgggacaggactggtagcagtagaggtgggtttaatctgctctcatatgtgatcctgacaaatgggtcccatcatccttttttcttactgcaatggccagggaaagaggggagatgggaaagaaaggtgtgagggtgttctgctcattaaaagaaggcaggaaactatgagagacatttttcataaaagtatggttctaaaatgattttaaagggggagtggtaaaagagttaaaccctcagctgtgcaaaactgcttggcctaccaggtaagtcatgctttgctgggcaccagcaatctcaactcatttcatcaaatactgaggggaaaaaaagggggagatgttgtgtttctcagtgaatgttctaggtaaccaaaagtaaacctgaaatccgttttgatttcaactcttctcaatggtgtgatgtgggaggtggcatgccggtgaacatggcagctctgtttgttgattacccatttgccctatgggctctggtgaggccactttctaagctttctgaacttgctttgtcatgggataggaaggacataggaaattgggtggaggcatttcttatcctccacgatttttctgtcccataggggcagagtctgaggtagtggaaagaataagagccctctagtcaagatgtcaggcttttccatatgatggggtcagaacccaggaacattggcataccctggtctccagtgcctaactcccttgaacaccccaaacactgaccttggcctttttttccccttctatggtgtcagccatgaaccttcattctgcatcccctggctgatgagacacaaccacatctcagagagaccccagttggtgagcccttccagttccttgagtctttttcctgagtacccaaagttggggtgaagagcactctaggaaatttaagtcttaagcaactcttgggctcctgtagcccaatgtccatcctgagggaggagcagtcctgctgtggccagagccctgtaacaaaacccattaggatcctccttgaccttatccagagacaaggcacgcggggttactggaggctcaagggtacggagtcaccagccgttgggtacctcctgacgcccaaaattgtccaagtctttcagaatgcagattcagccatggcggtcaaattaccacactcccttcaccatcaaatacaactctcgggcacaggccctttcttccaagaaaaacacacatttcgcattttgcagagaagagacaggacccagtgccccttgaggcggattcctggcccagcccccaaggagccagccctcctccccctcccccagcccggccccgccctgcctgtgtctggagatggccgggggatgactgcagaagcctgaaggggcgggggccgggcggcgcgcaggctacgggcggaggcaggagcgcgcgcctttttgtgcggctcctggcagctgtccgattggctgggcctgcgatgccgtcggagtgggcggagccagcagcgagctgggatctgtgcccagtcgcagccaggagcggccgcagacggagcgcacctcgcagctgccgggcgggccctggggggagctgcgtccagcagagctgctgggtggttgctcctcccgggctctcatctccggtatccgggccgacccccgcaccccctacttcccttgccctcgctgctctctccttagaggcgactctttggggaagggccagcaatcccgccttccccggccccagtagtcacccactctcccaccccacctctgttccttttcgcggccccgtctcccgcgccctcaggcgcccagaacgccccggccatgggcatccgaggcatgctgcgagccgcagtgatcctgctgctcatcaggacctggctcgcggagggcaactaccccagtcccatcccgaaattccacttcgagttctcctctgctgtgcccgaagtcgtcctgaacctcttcaactggtaagcgggcaccgccaggctaggcacggcg

SEQ ID NO: 44696 - DNA, 2300 bp, Homo sapien
tttacaattgttcaattcattcttccagactagccctcctggattcaaaaaccagatgaggaccacatcccacccttgatgggaaaaaaagcacacattaagtaagctcccttacatagcagcaaatatcctacgtaaattactagcatattaaataaacaggctctgcccaaggaaataacatacggtttaacattaggggaaaaaaaaaaaacggtttcattgtaattccttacatacaaaatggaggagaaaaaaatttgattgcgtcaacgggtacagaaaaagctttttaaagaaatttaatatgagttcatggtaaaaaaaaaaaaaaagtatttaacctatattcaaagagaaattgcacttcctaaaatcaacagcaaacatacttaaatgcaaaacgttcgaataattatcattcacgtcaggaacgagaagtagatgtaggctattatctctacgattgaaatcaggattgagacacaaagagctataagtaccaaaatgagtaagtggtatgaatactggaagaatatgtaatgtttagtgataataccattatcgatcttgaaaattcaaaggaaaaggtatgtggaatattcaagtgcatcggccttcagaacgaggtgtgcaacagattactacagcaaaatcaaaatcttcacctcacgaaagcaataactaactacaacaattaatagacaatatgccatttgcaatagcaacaaaattcatgaattgcctgaaaagaagtctaataaaaatgtataaggtctttatagagacaactgtcgaagtatactgacatattcaggtaaaaaaaaccttgaaattacatagaggagtataatatattcattcatggggagcacaacactgtaaaaatgtaaactcagcttaaattatttacaatttagtgccttacctgtagccgccgccattacaacaaatttgggctgctgtgctctgcttcccaaatcaaacctggaaaattacagaatggaaacagtaaataaaaaaccagtatcagcaacaaaatctacgcaacaaaacagggaaagcccagggtgagactcaaggctgtgttgagctggtacttgtgtttgacacttgcagtgttggttggagggggttagcagcagggatgttggggaggtttgtagccggcctacacggtagatgacagaatgggtagaataaaagtttgaaattttccacttcacttctttgcacaatctgaggcagcctctgaaaacacgatgccaagagccctaggtaatagcaggacaccaggaaaatttggttggttaaggcagtatgactccagagttctgctaataacaacctgaaaccaccatagtggcagaggaattacattttttaaaaaaaaaaattctttcaacagaacacaaagactgaaataggaggtcactacaaccgcgggagctgccgccccgccctgcagggagcacctggcctgggacccgcaggcattctctacaaggggtgcagctgtgcaaatgctcacaggtgacagaaacagagcatctcctgcccatcacttcatccaacagccagaggtgacgaagacgaccctcctgagtgaggactgagggtccacaccgcccccccaccccacacaccatagagggaccacagaatccagctcagcccctcttgtcagccctggtaaacgcaggcagtgatgtcacccagaccacaccccttcccccaatgccacttcagggggactcagagtcagagacttggtctgaggggagcagaagcaatctgcagaggatggcggtccaggctcagccaggcatcaacttcaggaccctgagggatgaccgaaggccccgcccacccacccccaactcccccgaccccaccaggatctacagcctcaggacccccgtcccaatccttaccccttgccccatcaccatcttcatgcttacctccacccccatccgatccccatccaggcagaatccagttccacccctgcccggaacccagggtagtaccgttgccaggatgtgacgccactgacttgcgcattggaggtcagaagaccgcgagattctcgccctgagcaacgagcgacggcctgacgtcggcggagggaagccggcccaggctcggtgaggaggcaaggtaagacgctgagggaggactgaggcgggcctcacctcagacagagggcctcaaataatccagtgctgcctctgctgccgggcctgggccaccccgcaggggaagacttccaggctgggtcgccactacctcacccc

SEQ ID NO: 44697 - DNA, 2300 bp, Homo sapien
ccctagttcatagacagctgccttttccctagatcctcacatgcaagaagggataagggatctccgtggagtctgttttataaaaacactaatcccattcatgaggactctgctctcatgatctagtcattctccaaataccccaccttctgcctaataccatcaccttggtaattcagcagatgaattttgtggcaacacaaatattcagaccaaagcaagcacggaaccaccattgcagtattatgcataccagtttcactgccctgataaattcccttgtgcttgtcggataaaccccatggccaccactgataggtttttcatctttataattttgcattttccagaatgtcatataaatagaatcttatactatgtagcctttttagactggtttctttcacttagcataatgaactgaagagtcatgtataactttgtgtggcttggaacttattccttttcattgaggagtagtatcaatgtctggttatatatatatatatatatatatatatatatatatatatatatccattcaccaaatgaaatacattttggatgcttctatttttggtgattatgaaataagctattgtatacattcatatacaaatttttatgtagacataagttttcaaatcaattgggtaaattgattgagtatggctgctgaatcttgtgctaagtctattttcatttttttaagaaaacgccaaactgccttccaaagtggctgtgccattttgcatttctaccagcaatgaaggagagtttccgttgctccacatcttcgctggcaattgttcttggtcttgtattctttgttttggttttctatggattttggacattctgataggtgtgcagtggtatcccattttagtacacaattatctaatgccaaagggtgctcagtacttttattatgcttatttgccatgtgtatatcttcttttgtgtagtgtgtgttcagatctttgactattttcattttttctatcattgagctttaagaattcgcatatattgtagagacaagttctttatcacatatgtgtaccgcagatgttttctgctagtctgtggcttctgttttcattctcttaacattgtcctttgaagagcataagatttttattttaataaaatcaacttggcaaatttttctttccttgatcatgcttttggtgttgaatttaaaaactcatcaccaaactcaaagttatgtggattttctcttatgttttcttatagaggttgtattgtttttgcatttttcattagacctatgatgtatcttgagttagttttcatggaatatgtaaggatatgtccaggttattataatttgtgtataggtgtctaattgttccgacaccttttgttggaaaacctgtactttcaccattattgcctttgttgtgaatcacctgactatatgcgtgcaggtctatttctgagctctattctgttttattaatctgtgtgtctattctttgctaatgcttatgtcctccaccaaattcatattttgaagccctcagccccagggtgtctgtatttggagatgaggcttctagggaagtgattaatgttaaaagaggccataagggtgggaccttgatcccatagaattagtttggttataagaagggagaagagacagaagaaagtacttttgtgcctacatgacctttctctctctctctctctctctctctctttctctctctctctctctctctctctctctctctctctctctctctctgcacatgcacagaggaaaggccaagaatggacagattaataaagggccatctacaagccacgaataaggccatcaccagaagccaaccccgccagtccttgatctaggacttccagacttcaaaactgtgagaaaaaaaataaatttctgttgttttagctactcactcaatggcattttgttatggcagcctgagctgacttaagacataacttcaggtgacacaattttttttttgtttcctcctagaaaaaaaaaaagtaattttgacatttaaagtctgtagttcattttgagttacatttctgtatggtgcaagatatgtgcaatggctagtactatgtgtcaacttgtctaggctatactgctcagctgtgtggtcaaacagtagtctagatgttgctgtgaaggtattttgtagatgtgatcaacatttacaatcagttgattttaagtaaagcagtttaacttccataatgtggatgggcctcatccaattagttgaaggtgttaagagaaaaga

SEQ ID NO: 44698 - DNA, 2300 bp, Homo sapien
cattagaaaaaacatctgtttcattgtgattccttacatacaaaatggaagagaaaaaaatttgatcctgccaacgggtacagaaaaagctttttaaataaatttaatatgaattcatggtaaaaaagaaaatatttaggcaacctatactgaaagagaacttccatttcctaaaatcaacagcaaacatacttaaatgtcaaatgttcgaagaattatcattcaagtcaggaacgagaagtagatgtagcctattatctctacatttgaaatcaggattgagacacaaagagctgtaagtaccgaaatgagtgagtggtatgaacattggaaaaacatgtagtgtttagtgataataccattatcgatcttgaaaattcaaaggaaaaggtatgcggaatattcaagtgcatcggccttcagaacgaggtgtgcaacagattactacagcaaaatcaaaatcttcacctcacgaaagcaataactaactacaacaattgatagacaatatgccacttgcaatagcaacaaaatccaagaattacctgaatagaagcctaataaaaatgtataagttgtttatagaggcaactaccgaagtatactgacatattcaggaaaaaagagcttgaaatccatagaggagtataacatattcattcacggggaacacaacagtgtaaaaatgtaaactcagcttaaattatttacaatttagtgccttacctgtagccgccgacattacaagcaaatttgggctgctgtgctctgcttcccaaatcaaccctgtaaatttatagaatggaaacagaaagtaaaacaccagtatcagcaagaaaatctacacaacaaaacagggaaagcccagagtgagactggagactgtgttgagctggtacttgtgtgtgacacttgcagtgtctgttggagggggttagcggcagagatgttggggaggtttgtagcctgcctagacggcagatgaaagaatgggtagaataaaagttttgaattttccacttcacttcattgcacaatctgaggcagcccctgaaaacacgatgccaagagccctaggtaatagcagtgtccaccaggaaaattgggtttgttaaggcagcatggctccagagttctgctaataacaacctgaaaccaacagagtgggagaggaattatgttttttaaaaaaattctttcaacagaacacaaagactggaatggaagtagactaggatatcagagtgaatcatgcatactaagggtaggtgttagttcatagaaataaatatatatattgctacctacatatatacttagaagatatgtaaaccgtatttcttcaattcagagaataaatcatttaggaccaaaggtttgccaagtgtagctctggctggggaggagcccccgtgggaaggtgtgcgtcttctcccagaggtcactatcatcgcgggagctcctgccctgcagggagcacctggcctggcacccgcagccattctctacaaggggtgcagatgcgcagatgcgcagatgctcagaggtgacagaaacagagcatctcccacccattccttcatcaaacagccaggagtgaggaagaggaccctcctgagtgaggactgaggatccaccctcacccacatagtgggaccacagaatccagctcagcccctcttgtcagccctggtacacactggcaatgatctcaccccgagcacacccctccccccaatgccacttcgggccgactcagagtcagagacttggtctgaggggagcagacacaatcggcagaggatggcggtccaggctcagtctggcatccaagtcaggaccttgagggatgaccaaaggcccctcccacccccaactcccccgaccccaccaggatctacagcctcaggatccccgtcccaatccctacccctacaccaacaccatcttcatgcttacccccacccccccatccagatccccatccgggcagaatccggttccacccttgccgtgaacccagggaagtcacgggcccggatgtgacgccactgacttgcgcattggaggtcagaggacagcgagattctcgccctgagcaacggcctgacgtcggcggagggaagcaggcgcaggctccgtgaggaggcaaggtaagacgccgagggaggactgaggcgggcctcaccccagacagagggcccccaataatccagcgctgcctctgctgccgggcctggaccaccctgcaggggaagacttctcaggctgagtcgccaccacctcaccccgccaccccc

SEQ ID NO: 44699 - DNA, 2300 bp, Homo sapien
taggaccaaaggtttgccaagtgtagctctggctggggaggagcccccgtgggaaggtgtgcgtcttctcccagaggtcactatcatcgcgggagctcctgccctgcagggagcacctggcctggcacccgcagccattctctacaaggggtgcagatgcgcagatgcgcagatgctcagaggtgacagaaacagagcatctcccacccattccttcatcaaacagccaggagtgaggaagaggaccctcctgagtgaggactgaggatccaccctcacccacatagtgggaccacagaatccagctcagcccctcttgtcagccctggtacacactggcaatgatctcaccccgagcacacccctccccccaatgccacttcgggccgactcagagtcagagacttggtctgaggggagcagacacaatcggcagaggatggcggtccaggctcagtctggcatccaagtcaggaccttgagggatgaccaaaggcccctcccacccccaactcccccgaccccaccaggatctacagcctcaggatccccgtcccaatccctacccctacaccaacaccatcttcatgcttacccccacccccccatccagatccccatccgggcagaatccggttccacccttgccgtgaacccagggaagtcacgggcccggatgtgacgccactgacttgcgcattggaggtcagaggacagcgagattctcgccctgagcaacggcctgacgtcggcggagggaagcaggcgcaggctccgtgaggaggcaaggtaagacgccgagggaggactgaggcgggcctcaccccagacagagggcccccaataatccagcgctgcctctgctgccgggcctggaccaccctgcaggggaagacttctcaggctgagtcgccaccacctcaccccgccaccccccgccgctttaaccgcagggaactctggcgtaagagctttgtgtgaccagggcagggctggttagaagtgctcagggcccagactcagccaggaatcaaggtcaggaccccaagaggggactgagggcaacccaccccctaccctcactaccaatcccatcccccaacaccaaccccacccccatccctcaaacaccaaccccacccccaaaccccattcccatctcctcccccaccaccatcctggcagaatccgggctttgcccctgcaatcaacccacggaagctccgggaatggcggccaagcacgcggatcctgacgttcacatgtacggctaagggagggaaggggttgggtctcgtgagtatggcctttgggatgcagaggaagggcccaggccctcctggaagacagtggagtccttaggggacccagcatgccaggacagggggcccactgtacccctgtctcaaactgagccaccttttcattcagccgcgggaatcctagggatgcagacccacttcagcagggggttggggcccagccctgcgaggagtcaaggggaggaagaagagggaggactgaggggaccttggagtccagatcagtggcaaccttgggctgggggatcctgggcacagtggccgaatgtgccccgtgctcattgcaccttcagggtgacagagagttgagggctgtggtctgagggctgggacttcaggtcagcagagggaggaatcccaggatctgccggacccaaggtgtgcccccttcatgaggactggggatacccccggcccagaaagaagggatgccacagagtctggccgtcccttgttcttagctctgggggaacctgatcagggatggccctaagtgacaatctcatttgtaccacaggcaggaggttggggaaccctcagggagataaggtgttggtgtaaagaggagctgtctgctcatttcagggggttgggggttgagaaagggcagtccctggcaggagtaaagatgagtaacccacaggaggccatcataacgttcaccctagaaccaaaggggtcagccctggacaacgcacgtgggggtaacaggatgtggcccctcctcacttctgtttccagatctcagggagttgatgaccttgttttcagaaggtgactcaggtcaacacaggggcccccatctggtcgacagatgcagtggttctaggatctgccaagcatccaggtggagagcctgaggtaggattgagggtactcctgggccagaatgcagacagggggccccatagaaatctgccctgcccctgcggttacttcagagaccctgggcagggctgtcagctgaagtccctccat

SEQ ID NO: 44700 - DNA, 2300 bp, Homo sapien
tcctgggagaggaatgcacgggccttcagtgtgcagactgcaagcacagccacggattcccagaagtctcagcagggttggccagactccgtgaggtccccactctacttgggtggagggtcccctctgtgctcactcagggccctcacctttctccttgtagggcctaatcccacccttttgctggcttgagaatctctcatgtcaagaactcacatccctgatatggtacagaaggagatgaggggacccacatctggccatacgtgaccaggtcctcccgcgaaggacaacgagagatgtccaaattcattggagtccaggtgtcctgggtgacgagtccgcttggtcctcacgtccactcctggcagggcctgagaccctccctctactgacctgactccagccccttcagaccaaggcctccccttccctgacatcaaagatcccaggataatggagggacttcagctgacagccctgcccagggtctctgaagtaaccgcaggggcagggcagatttctatggggccccctgtctgcattctggcccaggagtaccctcaatcctacctcaggctctccacctggatgcttggcagatcctagaaccactgcatctgtcgaccagatgggggcccctgtgttgacctgagtcaccttctgaaaacaaggtcatcaactccctgagatctggaaacagaagtgaggaggggccacatcctgttacccccacgtgcgttgtccagggctgacccctttggttctagggtgaacgttatgatggcctcctgtgggttactcatctttactcctgccagggactgccctttctcaacccccaaccccctgaaatgagcagacagctcctctttacaccaacaccttatctccctgagggttccccaacctcctgcctgtggtacaaatgagattgtcacttagggccatccctgatcaggttcccccagagctaagaacaagggacggccagactctgtggcatcccttctttctgggccgggggtatccccagtcctcatgaagggggcacaccttgggtccggcagatcctgggattcctccctctgctgacctgaagtcccagccctcagaccacagccctcaactctctgtcaccctgaaggtgcaatgagcacggggcacattcggccactgtgcccaggatcccccagcccaaggttgccactgatctggactccaaggtcccctcagtcctccctcttcttcctccccttgactcctcgcagggctgggccccaaccccctgctgaagtgggtctgcatccctaggattcccgcggctgaatgaaaaggtggctcagtttgagacaggggtacagtgggccccctgtcctggcatgctgggtcccctaaggactccactgtcttccaggagggcctgggcccttcctctgcatcccaaaggccatactcacgagacccaaccccttccctcccttagccgtacatgtgaacgtcaggatccgcgtgcttggccgccattcccggagcttccgtgggttgattgcaggggcaaagcccggattctgccaggatggtggtgggggaggagatgggaatggggtttgggggtggggttggtgtttgagggatgggggtggggttggtgttgggggatgggattggtagtgagggtagggggtgggttgccctcagtcccctcttggggtcctgaccttgattcctggctgagtctgggccctgagcacttctaaccagccctgccctggtcacacaaagctcttacgccagagttccctgcggttaaagcggcggggggtggcggggtgaggtggtggcgactcagcctgagaagtcttcccctgcagggtggtccaggcccggcagcagaggcagcgctggattattgggggccctctgtctggggtgaggcccgcctcagtcctccctcggcgtcttaccttgcctcctcacggagcctgcgcctgcttccctccgccgacgtcaggccgttgctcagggcgagaatctcgctgtcctctgacctccaatgcgcaagtcagtggcgtcacatccgggcccgtgacttccctgggttcacggcaagggtggaaccggattctgcccggatggggatctggatgggggggtgggggtaagcatgaagatggtgttggtgtaggggtagggattgggacggggatcctgaggctgtagatcctggtggggtcgggggagttgggggtgggaggggcctttggtcatccctcaaggtcctgacttggatgccagac

SEQ ID NO: 44701 - DNA, 2300 bp, Homo sapien
ggagaggaatccatgggcctcagggtgcagactgcaagtacagccacagattcccaaaattgtcaggagggtcggccagactctgtgaggtccccactctactggggtggagggtcccttctgtgctcactcagggccctcacctttctccttgcagggcctaataccgcccttttgctggccaaagaaactctcatggcaagaattcacatccctgatacggtacagaaggacatgaggggaccaacatctggccatacataaccagatcctcccacaaaggacaatgagagatgtccaaattcattggagtccaggtgtcctgggtgacgagcctgcttggtcctcaccactactcctgctagggcctgagagcctccctctactgacctgagtgcagccccttcagaccaaggcctccctttccctgacatcaaagatcccaggataatggagggacctcagcaggtagccttgcccaggctctctgagggaatagcaggggcagggcagatttctgtggggccctctgtcagcgttctggcccaggggtaccctcaatcctacctcaggcttctcacctggatgcttggtagatcttaggaccactgtgtctgtcgactacatgggggcccctgtgttgacctgagtcaccctctgaagaaaaggtcctcaactccctgagatctggaaacagaagtgaggaggagccacatcctgtcactcccaggtaggttgtccagggctgacccctttggttctagggtgaggcttctgatggcctcctgtgggttactcatctttactcctgccagggactgcccttcctcaacccccaaccccctgaaatgagcagacagctcctctttacaccaacaccttatctccctgagggttccccaacctcttgcctgtggtacaaatgacattgccaattggagctatctctgatcgggttcccttagagctaagaataagggacagccagactctgtggcatcccttctttctgggccgggggtatccccagtcctcatgaagggggcacaccttgggtccggcagatcctgggattcctccctctgctgacctgaagtgccactcctcagaccacagcccgcaaatctgtcaccctgaagtcgcaatgagcatggggcacattaggccactgtgcccaggatcccccagcccaaggttgccactgatctggactccaaggtcccctcagtcctccctcttcttcctccccttgactcctcgcagggctgggctccaactccctgctgaagtgggtctgtatccctaggattcccgcggccgaatgaaaaggtggctcagtttgagacaggggtactttgggcccctgtcctggcatgctgggagccctccggactccattatcttccaggaggggcttgggcccatcctctgcttcccaaaggccgtactcacgataccgacccccttccctccctgagccacagatgtgaacgtcaggatccgcgtgcttggccgccattcccggagcttccgtgggttgattgcaggggcaaagctccgattctgccaggatgggtggggatgggaatcggggtttgggggtcccgttgatgtttgagcgatggtggtgggtttggtgttgggggatgggggtggggttggtgttgggggatgggaatggtggtgggggtgcgggggggttaccctcagtcccctcttggggtcctgaccttgattcctggctgagtctgggccctgagcacttctaaccagccctgccctggtcacacaaagctcttacaccagagttccctgcggttaaagcggcggggggtggcggggtgaggtggtggcgactgagcctgagaagtcttcccctgcagggtggtccaggcctggcagcagaggcagcgctggattattgggggccctctgtctggggtgaggcccgcctcagtcctccctcggcatcttaccttgcctcctcacggagcctgcgcctgcttccctccaccgacgtcaggccgttgctcagggcgagaatctcgctgttctctgacctccaacgcgcaagtcagtggcgtcacatccggccccgtgacttccctgggttcacagcaggggtggaactggattcttcctggatggggatccagatggaggtggaggtaagcatgaagatggtgttgggggtaggggtagggatagggacggggatcctgaggctgtagatcctggtggggttgggggagttgggggtgggaggggcctttggtcatccctcaaggtcctgacttgga

SEQ ID NO: 44702 - DNA, 2300 bp, Homo sapien
ggctctgcccaaggaaataacatatgatttaacatcagaaaaaaaaaaaacggtttcattgtaattccttacatacaaaatggaggagaaaaaatttgatcctgtcaaagggtacagaaaaagctttttaaagacatttaatgagtttatggaaaaaagaaaatatttatttaacctatattcaaagagcacttccatttcctaaaatcaacagcaaacatacttaaatgtcaaatgttcgaagaactatcattccagtcaggaacgagaagtagatgaagcctattatctctacgtttgaaatcaggattgagacacaaaaagctataagtatcaaaatgagtaagtggtatgaatattggaaaaacatgtaatgtttagtgataataccattatcgatcttgaaaattcaaaggaaaaggcatgtggaatattcaagtgcatcggccttcagaatgaggtgtgcaacagattactacagcaaaatcaaaatcttcacctcacgaaagcaataactaactacagcaattaatagacaatatgccatttgcaatagcaataaaatccaagaattacctgaatagaagtctaataaaaatgtataagctgcttatagaggcaactatcgaagtatactgacatattcaggaaaaaatagcttgacatacatagaggagtataacatattcattcatggggaacacaacagtgtaaaaatgtaaactcagcttaaattatttacaatttagtgccttacctgtagtcgccgacattacaagcaaatttgggctgctgtgctctgcttcccaaatcaaccctgtaaatttatagaatggaaacagaaagtaaaaaaccagtattagcaagaaaatctacacaacaaaacagggccagtccagggtgagactgaagaccttgttgagctggtacttgtgtgtgacacttgccgtgtcggttagagggggttagcggcagggatgttggggaggtttgtagcctgcctagacggcagataacagaatgggtagaataaaagttttaaaatttccacttcacttcattgcacaatctgaggcagctcctgaaaacacgatgccaagagccctaggtaatagcaggacaccaggaaaattgggtttgttaaggcagcatggctccagagttctgctaataacaacctgaaaccaacatagtgggagaggaattacgtttaaaaaaaaattccttcaacagaacacaaagactggaatagaagtagattaggatagtaagagtgaacgatgcatactaagggtaggtgttagttcgtagaaataaatatatatatcgctacctacatatatacttggaagatatgtaaaccgtatttcttcaattcagtgaataaatcatttaggaccaaaggtttgccaagtgtagctctggctggagaggagctcccgtgggaaagtgtctgtcttcttccagaggtcaatacgatcgtgggagctcccgccctgcagggagctcctggcctgggacccgcagccattctctacaaggggtgcagctgtgcaaatgcacagacgttacagaaacagagtatctcctgccaatcacttcatccaacagccaggagtgaggaagaggaccctcttgagtgaggactgagggtccaccctcccccacgtagtgggaccacagaatccagctcagtccctcttgtcagccctgataaacttaggcaataatgtcaccccgaccgcacccctcccccagtgccacttcagggggactcagagtcagagacttggtctgaggggagcagacacaatcggcagaggatggcggtccaggctcagcctggcatccaagtcaggaccttgagggatgaccaaaggcccctcccacccccaactcccccaaccccaccaggatctacagcctcaggatccccgtccctatccctacccctacccccaacaccatcttcatgcttacctccacctccatctggatccccatccaggaagaatccagttccacccctgctgtgaacccagggaagtcacggggccggatgtgacgccactgacttgcgcgttggaggtcagagaacagcgagattctcgccctgagcaacggcctgacgtcggtggagggaagcaggcgcaggctccgtgaggaggcaaggtaagatgccgagggaggactgaggcgggcctcaccccagacagagggcccccaataatccagcgctgcctctgctgccaggcctggaccaccctgcaggggaagacttctcaggctcagtcgccacc

SEQ ID NO: 44703 - DNA, 2300 bp, Homo sapien
tcctgggagaggaatgcacgggccttcagtgtgcagactgcaagcacagccacggattcccagaagtctcagcagggttggccagactccgtgaggtccccactctacttgggtggagggtcccctctgtgctcactcagggccctcacctttctccttgtagggcctaatcccacccttttgctggcttgagaatctctcatgtcaagaactcacatccctgatatggtacagaaggagatgaggggacccacatctggccatacgtgaccaggtcctcccgcgaaggacaacgagagatgtccaaattcattggagtccaggtgtcctgggtgacgagtccgcttggtcctcacgtccactcctggcagggcctgagaccctccctctactgacctgactccagccccttcagaccaaggcctccccttccctgacatcaaagatcccaggataatggagggacttcagctgacagccctgcccagggtctctgaagtaaccgcaggggcagggcagatttctatggggccccctgtctgcattctggcccaggggtaccctcaatcctacctcaggctctccacctggatgcttggcagatcctagaaccactgcatctgtcgaccagatgggggcccctgtgttgacctgagtcaccttctgaaaacaaggtcatcaactccctgagatctggaaacagaagtgaggaggggccacatcctgttacccccacgtgcgttgtccagggctgacccctttggttctagggtgaacgttatgatggcctcctgtgggttactcatctttactcctgccagggactgccctttctcaacccccaaccccctgaaatgagcagacagctcctctttacaccaacaccttatctccctgagggttccccaacctcctgcctgtggtacaaatgagattgtcacttagggccatccctgatcaggttcccccagagctaagaacaagggacggccagactctgtggcatcccttctttctgggccgggggtatccccagtcctcatgaagggggcacaccttgggtccggcagatcctgggattcctccctctgctgacctgaagtcccagccctcagaccacagccctcaactctctgtcaccctgaaggtgcaatgagcacggggcacattcggccactgtgcccaggatcccccagcccaaggttgccactgatctggactccaaggtcccctcagtcctccctcttcttcctccccttgactcctcgcagggctgggccccaaccccctgctgaagtgggtctgcatccctaggattcccgcggctgaatgaaaaggtggctcagtttgagacaggggtacagtgggccccctgtcctggcatgctgggtcccctaaggactccactgtcttccaggagggcctgggcccttcctctgcatcccaaaggccatactcacgagacccaaccccttccctcccttagccgtacatgtgaacgtcaggatccgcgtgcttggccgccattcccggagcttccgtgggttgattgcaggggcaaagcccggattctgccaggatggtggtgggggaggagatgggaatggggtttgggggtggggttggtgtttgagggatgggggtggggttggtgttgggggatgggattggtagtgagggtagggggtgggttgccctcagtcccctcttggggtcctgaccttgattcctggctgagtctgggccctgagcacttctaaccagccctgccctggtcacacaaagctcttacgccagagttccctgcggttaaagcggcggggggtggcggggtgaggtggtggcgactgagcctgagaagtcttcccctgcagggtggtccaggcccggcagcagaggcagcgctggattattgggggccctctgtctggggtgaggcccgcctcagtcctccctcggcgtcttaccttgcctcctcacggagcctgcgcctgcttccctccgccgacgtcaggccgttgctcagggcgagaatctcgctgtcctctgacctccaatgcgcaagtcagtggcgtcacatccgggcccgtgacttccctgggttcacggcaagggtggaaccggattctgcccggatggggatctggatgggggggtgggggtaagcatgaagatggtgttggtgtaggggtagggattgggacggggatcctgaggctgtagatcctggtggggtcgggggagttgggggtgggaggggcctttggtcatccctcaaggtcctgacttggatgccagac

SEQ ID NO: 44704 - DNA, 2300 bp, Homo sapien
taggaccaaaggtttgccaagtgtagctctggctggggaggagcccccgtgggaaggtgtgcgtcttctcccagaggtcactatcatcgcgggagctcctgccctgcagggagcacctggcctggcacccgcagccattctctacaaggggtgcagatgcgcagatgcgcagatgctcagaggtgacagaaacagagcatctcccacccattccttcatcaaacagccaggagtgaggaagaggaccctcctgagtgaggactgaggatccaccctcacccacatagtgggaccacagaatccagctcagcccctcttgtcagccctggtacacactggcaatgatctcaccccgagcacacccctccccccaatgccacttcgggccgactcagagtcagagacttggtctgaggggagcagacacaatcggcagaggatggcggtccaggctcagtctggcatccaagtcaggaccttgagggatgaccaaaggcccctcccacccccaactcccccgaccccaccaggatctacagcctcaggatccccgtcccaatccctacccctacaccaacaccatcttcatgcttacccccacccccccatccagatccccatccgggcagaatccggttccacccttgccgtgaacccagggaagtcacgggcccggatgtgacgccactgacttgcgcattggaggtcagaggacagcgagattctcgccctgagcaacggcctgacgtcggcggagggaagcaggcgcaggctccgtgaggaggcaaggtaagacgccgagggaggactgaggcgggcctcaccccagacagagggcccccaataatccagcgctgcctctgctgccgggcctggaccaccctgcaggggaagacttctcaggctcagtcgccaccacctcaccccgccaccccccgccgctttaaccgcagggaactctggcgtaagagctttgtgtgaccagggcagggctggttagaagtgctcagggcccagactcagccaggaatcaaggtcaggaccccaagaggggactgagggcaacccaccccctaccctcactaccaatcccatcccccaacaccaaccccacccccatccctcaaacaccaaccccacccccaaaccccattcccatctcctcccccaccaccatcctggcagaatccgggctttgcccctgcaatcaacccacggaagctccgggaatggcggccaagcacgcggatcctgacgttcacatgtacggctaagggagggaaggggttgggtctcgtgagtatggcctttgggatgcagaggaagggcccaggccctcctggaagacagtggagtccttaggggacccagcatgccaggacagggggcccactgtacccctgtctcaaactgagccaccttttcattcagccgcgggaatcctagggatgcagacccacttcagcagggggttggggcccagccctgcgaggagtcaaggggaggaagaagagggaggactgaggggaccttggagtccagatcagtggcaaccttgggctgggggatcctgggcacagtggccgaatgtgccccgtgctcattgcaccttcagggtgacagagagttgagggctgtggtctgagggctgggacttcaggtcagcagagggaggaatcccaggatctgccggacccaaggtgtgcccccttcatgaggactggggatacccccggcccagaaagaagggatgccacagagtctggccgtcccttgttcttagctctgggggaacctgatcagggatggccctaagtgacaatctcatttgtaccacaggcaggaggttggggaaccctcagggagataaggtgttggtgtaaagaggagctgtctgctcatttcagggggttgggggttgagaaagggcagtccctggcaggagtaaagatgagtaacccacaggaggccatcataacgttcaccctagaaccaaaggggtcagccctggacaacgcacgtgggggtaacaggatgtggcccctcctcacttctgtttccagatctcagggagttgatgaccttgttttcagaaggtgactcaggtcaacacaggggcccccatctggtcgacagatgcagtggttctaggatctgccaagcatccaggtggagagcctgaggtaggattgagggtacccctgggccagaatgcagacagggggccccatagaaatctgccctgcccctgcggttacttcagagaccctgggcagggctgtcagctgaagtccctccat

SEQ ID NO: 44705 - DNA, 2300 bp, Homo sapien
cattagaaaaaacatctgtttcattgtgattccttacatacaaaatggaagagaaaaaaatttgatcctgccaacgggtacagaaaaagctttttaaataaatttaatatgaattcatggtaaaaaagaaaatatttaggcaacctatactgaaagagaacttccatttcctaaaatcaacagcaaacatacttaaatgtcaaatgttcgaagaattatcattcaagtcaggaacgagaagtagatgtagcctattatctctacatttgaaatcaggattgagacacaaagagctgtaagtaccgaaatgagtgagtggtatgaacattggaaaaacatgtagtgtttagtgataataccattatcgatcttgaaaattcaaaggaaaaggtatgcggaatattcaagtgcatcggccttcagaacgaggtgtgcaacagattactacagcaaaatcaaaatcttcacctcacgaaagcaataactaactacaacaattgatagacaatatgccacttgcaatagcaacaaaatccaagaattacctgaatagaagcctaataaaaatgtataagttgtttatagaggcaactaccgaagtatactgacatattcaggaaaaaagagcttgaaatccatagaggagtataacatattcattcacggggaacacaacagtgtaaaaatgtaaactcagcttaaattatttacaatttagtgccttacctgtagccgccgacattacaagcaaatttgggctgctgtgctctgcttcccaaatcaaccctgtaaatttatagaatggaaacagaaagtaaaacaccagtatcagcaagaaaatctacacaacaaaacagggaaagcccagagtgagactggagactgtgttgagctggtacttgtgtgtgacacttgcagtgtctgttggagggggttagcggcagagatgttggggaggtttgtagcctgcctagacggcagatgaaagaatgggtagaataaaagttttgaattttccacttcacttcattgcacaatctgaggcagcccctgaaaacacgatgccaagagccctaggtaatagcagtgtccaccaggaaaattgggtttgttaaggcagcatggctccagagttctgctaataacaacctgaaaccaacagagtgggagaggaattatgttttttaaaaaaattctttcaacagaacacaaagactggaatggaagtagactaggatatcagagtgaatcatgcatactaagggtaggtgttagttcatagaaataaatatatatattgctacctacatatatacttagaagatatgtaaaccgtatttcttcaattcagagaataaatcatttaggaccaaaggtttgccaagtgtagctctggctggggaggagcccccgtgggaaggtgtgcgtcttctcccagaggtcactatcatcgcgggagctcctgccctgcagggagcacctggcctggcacccgcagccattctctacaaggggtgcagatgcgcagatgcgcagatgctcagaggtgacagaaacagagcatctcccacccattccttcatcaaacagccaggagtgaggaagaggaccctcctgagtgaggactgaggatccaccctcacccacatagtgggaccacagaatccagctcagcccctcttgtcagccctggtacacactggcaatgatctcaccccgagcacacccctccccccaatgccacttcgggccgactcagagtcagagacttggtctgaggggagcagacacaatcggcagaggatggcggtccaggctcagtctggcatccaagtcaggaccttgagggatgaccaaaggcccctcccacccccaactcccccgaccccaccaggatctacagcctcaggatccccgtcccaatccctacccctacaccaacaccatcttcatgcttacccccacccccccatccagatccccatccgggcagaatccggttccacccttgccgtgaacccagggaagtcacgggcccggatgtgacgccactgacttgcgcattggaggtcagaggacagcgagattctcgccctgagcaacggcctgacgtcggcggagggaagcaggcgcaggctccgtgaggaggcaaggtaagacgccgagggaggactgaggcgggcctcaccccagacagagggcccccaataatccagcgctgcctctgctgccgggcctggaccaccctgcaggggaagacttctcaggctcagtcgccaccacctcaccccgccaccccc

SEQ ID NO: 44706 - DNA, 2300 bp, Homo sapien
ctccctagttcatagacagctgccttttccctagatcctcacatgcaagaagggataagggatctccgtggagtctgttttataaaaacactaatcccattcatgaggactctgctctcatgatctagtcattctccaaataccccaccttctgcctaataccatcaccttggtaattcagcagatgaattttgtggcaacacaaatattcagaccaaagcaagcacggaaccaccattgcagtattatgcataccagtttcactgccctgataaattcccttgtgcttgtcggataaaccccatggccaccactgataggtttttcatctttataattttgcattttccagaatgtcatataaatagaatcttatactatgtagcctttttagactggtttctttcacttagcataatgaactgaagagtcatgtataactttgtgtggcttggaacttattccttttcattgaggagtagtatcaatgtctggttatatatatatatatatatatatatatatatatatatatatccattcaccaaatgaaatacattttggatgcttctatttttggtgattatgaaataagctattgtatacattcatatacaaatttttatgtagacataagttttcaaatcaattgggtaaattgattgagtatggctgctgaatcttgtgctaagtctattttcatttttttaagaaaacgccaaactgccttccaaagtggctgtgccattttgcatttctaccagcaatgaaggagagtttccgttgctccacatcttcgctggcaattgttcttggtcttgtattctttgttttggttttctatggattttggacattctgataggtgtgcagtggtatcccattttagtacacaattatctaatgccaaagggtgctcagtacttttattatgcttatttgccatgtgtatatcttcttttgtgtagtgtgtgttcagatctttgactattttcattttttctatcattgagctttaagaattcgcatatattgtagagacaagttctttatcacatatgtgtaccgcagatgttttctgctagtctgtggcttctgttttcattctcttaacattgtcctttgaagagcataagatttttattttaataaaatcaacttggcaaatttttctttccttgatcatgcttttggtgttgaatttaaaaactcatcaccaaactcaaagttatgtggattttctcttatgttttcttatagaggttgtattgtttttgcatttttcattagacctatgatgtatcttgagttagttttcatggaatatgtaaggatatgtccaggttattataatttgtgtataggtgtctaattgttccgacaccttttgttggaaaacctgtactttcaccattattgcctttgttgtgaatcacctgactatatgcgtgcaggtctatttctgagctctattctgttttattaatctgtgtgtctattctttgctaatgcttatgtcctccaccaaattcatattttgaagccctcagccccagggtgtctgtatttggagatgaggcttctagggaagtgattaatgttaaaagaggccataagggtgggaccttgatcccatagaattagtttggttataagaagggagaagagacagaagaaagtacttttgtgcctacatgacctttctctctctctctctctctctctctctttctctctctctctctctctctctctctctctctctctctctctctctgcacatgcacagaggaaaggccaagaatggacagattaataaagggccatctacaagccacgaataaggccatcaccagaagccaaccccgccagtccttgatctaggacttccagacttcaaaactgtgagaaaaaaaataaatttctgttgttttagctactcactcaatggcattttgttatggcagcctgagctgacttaagacataacttcaggtgacacaattttttttttgtttcctcctagaaaaaaaaaaagtaattttgacatttaaagtctgtagttcattttgagttacatttctgtatggtgcaagatatgtgcaatggctagtactatgtgtcaacttgtctaggctatactgctcagctgtgtggtcaaacagtagtctagatgttgctgtgaaggtattttgtagatgtgatcaacatttacaatcagttgattttaagtaaagcagtttaacttccataatgtggatgggcctcatccaattagttgaaggtgttaagagaaaaga

SEQ ID NO: 44707 - DNA, 2300 bp, Homo sapien
ctagaacatacaaaatatttacaattgttcaattcattcttccagactagccctcctggattcaaaaaccagatgaggaccacatcccacccttgatgggaaaaaaagcacacattaagtaagctcccttacatagcagcaaatatcctacgtaaattactagcatattaaataaacaggctctgcccaaggaaataacatacggtttaacattaggggaaaaaaaaaaaacggtttcattgtaattccttacatacaaaatggaggagaaaaaaatttgattgtgtcaacgggtacagaaaaagctttttaaagaaatttaatatgagttcatggtaaaaaaaaaaaaaagtatttaacctatattcaaagagaaattgcacttcctaaaatcaacagcaaacatacttaaatgcaaaacgttcgaataattatcattcacgtcaggaacgagaagtagatgtaggctattatctctacgattgaaatcaggattgagacacaaagagctataagtaccaaaatgagtaagtggtatgaatactggaagaatatgtaatgtttagtgataataccattatcgatcttgaaaattcaaaggaaaaggtatgtggaatattcaagtgcatcggccttcagaacgaggagtgcaacagattactacagcaaaatcaaaatcttcacctcacgaaagcaataactaactacaacaattaatagacaatatgccatttgcaatagcaacaaaattcatgaattgcctgaaaagaagtctaataaaaatgtataaggtctttatagagacaactgtcgaagtatactgacatattcaggtaaaaaaaagcttgaaatacatagaggagtataatatattcattcatggggagcacaacactgtaaaaatgtaaactcagcttaaattatttacaatttagtgccttacctgtagccgccgccattacaacaaatttgggctgctgtgctctgcttcccaaatcaaacctggaaaattacagaatggaaacagtaaataaaaaaccagtatcagcaacaaaatctacgcaacaaaacagggaaagcccagggtgagactcaaggctgtgttgagctggtacttgtgtttgacacttgcagtgttggttggagggggttagcagcagggatgttggggaggtttgtagccggcctacacggtagatgacagaatgggtagaataaaagtttgaaattttccacttcacttctttgcacaatctgaggcagcctctgaaaacacgatgccaagagccctaggtaatagcaggacaccaggaaaatttggttggttaaggcagtatgactccagagttctgctaataacaacctgaaaccaccatagtggcagaggaattacattttttaaaaaaaaaaattctttcaacagaacacaaagactgaaataggaggtcactacaaccgcgggagctgccgccccgccctgcagggagcacctggcctgggacccgcaggcattctctacaaggggtgcagctgtgcaaatgctcacaggtgacagaaacagagcatctcctgcccatcacttcatccaacagccagaggtgacgaagacgaccctcctgagtgaggactgagggtccacaccgcccccccaccccacacaccatagagggaccacagaatccagctcagcccctcttgtcagccctggtaaacgcaggcagtgatgtcacccagaccacaccccttcccccaatgccacttcagggggactcagagtcagagacttggtctgaggggagcagaagcaatctgcagaggatggcggtccaggctcagccaggcatcaacttcaggaccctgagggatgaccgaaggccccgcccacccacccccaactcccccgaccccaccaggatctacagcctcaggacccccgtcccaatccttaccccttgccccatcaccatcttcatgcttacctccacccccatccgatccccatccaggcagaatccagttccacccctgcccggaacccagggtagtaccgttgccaggatgtgacgccactgacttgcgcattggaggtcagaagaccgcgagattctcgccctgagcaacgagcgacggcctgacgtcggcggagggaagccggcccaggctcggtgaggaggcaaggtaagacgctgagggaggactgaggcgggcctcacctcagacagagggcctcaaataatccagtgctgcctctgctgccgggcctgggccaccccgcaggggaagacttccaggctgggtcg

SEQ ID NO: 44708 - DNA, 2300 bp, Homo sapien
caaggtgacgtttgctacctatcgctatatctctccctatcccatatctatttcctaactgatttggaattctgtgggaagaggtatctgcttggaagtcttgagaaagaagcacaagggcttgttttgggagcccaaagtaacatgatgggagggcaggcctcctgatgcagttgctacctggactgctctgtggtcacatgactgttttaacaggaagacgccatggacctctgcagatgactggggctccataccatgataattgtcttagctacttaccattttctgggtcatcacagttaaaaagtcaccaaagttcatttttcctgtcccttccttatcaatttcacttatcattttcttaatttcttctttcttgggttcaaagcccagggccctcattgccacctataaagaaaacaggatcgtctcaataagcacatctaaagtagcaggagcaaaaataacagtgttgagagcattaagccagcatctgatgtggtcatgttaatatgattggggaacactatgacattgatctaattgatatttgcaatcaattttattgaataatactcaaagtaagtaaagacaggaaaacagcacagtacaacctcccctgttacttactgcagggagaagagggcaaaaggggtagagaggtgatagggagatgacaaggaagaggcagaggaaaggaagggcagtacggcaggaatgcacagagcttgccttcagttctttaacatctatggtgccagttccatccgcatcgaaaagatcaaaagcttcccggatctcctgcttttgctcttcagtaagctcaggcttagggctcattctttttcgctgagaacttgatgccatgtttgccttcttaaagttggaggcctttatatgttatgcaatacacaagcacaataatatatcatacagtccatatttacataacatagttacagacacccatatgtatttttaaagtcatttatataaccaattccaaagctttgcttaaaaagaaagataacagggtttactggcaagaacaatgaatctttccatgaacttctacccctcccttttctttactgttgtttctagaagcagggagatcacttgttcagtaaggacacctcttactgaaaatcatcccaaaagagagccagtcaagaagatgactgtgaataactagagataatcagctcttcccgaacgtggggatcctggttctgaaaacagtcttacgatgcccactcccagtactccccttcccagtaagtactccgacttcccaattacttctagatttggccaaatattagtaagttgttaagatgtatattgtgtcagtaccgagtaataaaactcaatccatctggcaccttcgtgccttctccaagaagctaaagcatcccctgaatgcccctgtatttaaattgtaaaaaacattgtaacagaacacgatacaccttttcccagctgtgtgtggaaattttggcagaatgaggaggccagggggccaaggtctgagagagtcaggggcctgtgagggattcgagtcttttttgcccagggaggttcaccgaggggatcagggaatgcaaggggagcccgaggggcgggtgtgggcctgttgtgggtgaagaggaggcagcagcgaagcgcaggcccagtaggttggttagcgtctgtaccctactctcccgggaaagagctcaaaggaaagactggtgcgctaaagccgagaaaggcgcaggagaggcggcgtggccgagctggggcctgggaagggctcagccgctgggcgtggggcgcgacagagcggcagcactcaccatagccaaaggagtccgctgccggttgttaggcaaccgacgtgtacactgactcggcgccgttcccaccgccccgcgcgcgcagccccgctccccattggccgtccgctcgtcgccgcctctccctattggtgcagggccgaagagggtgggactaacctggcaaagccccggcccagcgcggggaggggcacgctggcgacagagccccgtctttattgggcaagatcacgccgtgagcgccaattggctgagtcgtcgccgagctgggccaatcctcttggtggaggaagctcggctgattctcggctcacgcgggaggggagtaaagggtggcggtccgggcctggagttcagtgggtgcagcctgcttgcgagctgaggccagacaggggggcgcctacggacgggtaagagtcgtggccttgccattggaggtcaccctgtgtcagcgactgg

SEQ ID NO: 44709 - DNA, 2300 bp, Homo sapien
tcaggccactttacatataagtagttcatcccattgagatgcaaaagtatcccatcaggtagacagtactggtctcactcaacaaatgagaaacaggctcagagaggttaagcgacttgcccaaggtcacacagcctgcacacagcctgcgcagaacttgtgtttttcccttgtactctgtcaggcttccgatctgcaggttgacggactgggaagcaaggtatggagggacattaagctagaagggttaccaggggcaaaactgggcagagggatcacaggccaggctaaggagccctttacggttcaggctctgaaggtttaagagcagggagatgccctgaccagggccgttcactacgaagattaacctggtagagcagggaggactagctaggtgagagctgggaaacaggggagctactcatcagttgtctaatatgtgcccctctctgttctaggtcctggagtaccagtagtgaatacaacaaagatgcctgccctcagacagcctgccttctagtggagggacaacaaagagcaaaacaaacaagcaaaatatacagtaggtcagaaggggataagaactgttggaaaaaaaagtagagcaaggtgagtggcttgtttgtactgggggctgcaatacttaaatagggtgcctaagaggaggcaggcggagaggacaactgagacaaagatgagaggcaggagtgtggctggcacatgaggttcaaccacaaagccagtgttctggggctggagtgagccagacgagagaagagttgtggagcgatggaaggggacacgtcgtgccaagctttggagatcacagtgagaactctggctcgtactacttggggggatgatgatgacccaaaagtcaggaatctgttcactgctgaagagagaagagggcaaagggcagcagctccatttaaaaggttctaataagcctcgggcctttctctgtctgagaaacttactctctgccctctgtctccctagattactgcccctatgcctggaggaaaaacaggtgaaggctaaaagccacggggatagctaaagagggcaaactggacctccagctccacttctgcaggtctatgtcagtccacagcccttgcacacgctcccttttaattctccaagcatacctctcacttccaaaactcctgtgactctgctgatgagggcgtctcggcctggaatgctcctccttatctgcattgtgtgggtgtcaaaaagagtatattttgatgacctctccccgcccctcatgctcgctcacatccccctcactcctttcaaagtccgttcccaaaggccccagttcaccgtcctgggctgcttttagccaggtaagatctaaagtgatcctctcttggaacctggtctggggcctatacatctgggtcagtctaggggtgctctcgaagggccaccctcaaagagcgagcctcggctggattcagttcctaggtcccagccgtccgacctctgcgacaacactcagcacaccccttcccctctccgggtctcagttgccccgtgagtacagtccctgctccaacacgcaaggtaatcgtttctggctgctctgatgcactcggtccctaaactcagccttaggtcaacccagaaagcacccgacccgggcgaccccgtagctccccaccctcccgcactgcccagtcgctgacacagggtgacctccaatggcaaggccacgactcttacccgtccgtaggcgcccccctgtctggcctcagctcgcaagcaggctgcacccactgaactccaggcccggaccgccaccctttactcccctcccgcgtgagccgagaatcagccgagcttcctccaccaagaggattggcccagctcggcgacgactcagccaattggcgctcacggcgtgatcttgcccaataaagacggggctctgtcgccagcgtgcccctccccgcgctgggccggggctttgccaggttagtcccaccctcttcggccctgcaccaatagggagaggcggcgacgagcggacggccaatggggagcggggctgcgcgcgcggggcggtgggaacggcgccgagtcagtgtacacgtcggttgcctaacaaccggcagcggactcctttggctatggtgagtgctgccgctctgtcgcgccccacgcccagcggctgagcccttcccaggccccagctcggccacgccgcctctcctgcgcctttctcggctttagcgcaccagtctttcctttgagctctttcccgggagagtagggtacagacg

SEQ ID NO: 44710 - DNA, 2300 bp, Homo sapien
catgctgggcacagaggatgcaggagtggtcaagacaaaggccctgtctttgggcaactgacgtcccagcaggggactcaggcaggaccctagtaaacagttcaatacaaaagcgagaacccccaagtgtgcctgcaacatggccacctctgggaggctgtcccctgttagagatggagattgtggggttggagactaccggaggctctgtgttgcccttgacccaaaccccgatgctccagcccacatcccctccactgcaggacagaagggtctaccctgaccccttgactcctcccctaactctgaggaggactctttgcaggggcccctaactcctgcccggaggccagaacttccaggctgaccacccctggctgtcagctccctgcccgctcgtcttggctgccccctgagttatctgagccccctcagttgctgccaagcaggaggtcccaagcacccagagcctaatgtttcccagccgctgaacaaggcctggccgcgccctctcgtctcaaacttccaccaagacttggggtgtgggcatgcaaggagctggagcaaagagggccccgagggacaggaagggggacagctggcttcggctggctgctgcctgggctctccccttcaagccctcatgcaccttcctggtggaggctgttgagggagatcaggtcagaccccgggctgaggggaagcctctggctctgactggggagcctccagcttgcactggttcagccccaagcacagaggatgggagggctgtcagctgagagcagtgctccgtcggcgcagcactgggaactggctggccaaggagaagctggactttggagaggccatcaagctgccttcctaggcacctgccatgaggagtcacctggggcacttttcctgggggagcatgagggaaataggcagagcatagcgggcacctgatcaggggcacagggggctggcacccctcgtttctgctgtactgggacacctggagcacttgccagccaatcttatttgctatcgttaagggcaggataaagtaggatgacctcagccctccagcaagcctcgcttcactccaccccttcttctcttcggcaggcctccgagcacaagggctcccactggctacatcatccggtaagtgaccgcaggactctgccggccttcctgtgcccactcacgccaagccctgacttcttacccctccagtccctccagggagctcaccggcatctcctgggctctctttcaggggagtgttcaccaagcccatagacagctcttcccagccccagcagcagttccccaaggccaacgggactccaaaaaggtatgtccatggggtgttggccagtcggccagtggggaggtgtgagggcctggtctgggctcctggcagagacagtgctctgcctatcaggactgtggggccttggaggtgccagctttcatcctgggtagggcaggaccctggagagcagggtggggtgaccagaggagatgggctggggtgggactggcagtcccaagtggatgtgtgggtctctgggaggtcctgggccactaacagtgtccttgtcctggggtcagtcctgactaggcctggctaatgggacagagaggtgcaggagtttgggaggggctgggtgtagagtccccctagcctggcagtgggcacccttgacttgacttgctgatggcattgagaaggctgaagttgcatgcaattcaagcaccttggcatcaggcattgcctgggactccgtcagactggaaaggccaaggggacccggaaacaggaagcaaagacacaggcaagagcccgctgggctgttccctgaagctcggtggggtttgcctacacagctgctctgagtggcgcagttccgggtgtctgtcagggccaaaagcaaagaggaaaggctcccaggcagctcctggtccacctctcatgtgtccactgggctgtgtggccaaatctggaggcaggagggagcctgcaggtagacacatggaaccttctcctctctagtgctgccagtctggtgagaacagctaacgctggtcctccccgcccctcctcctctggctacaagatgaccactgaggattacaagaagctgtgagtatgcaacgccaggctcagcgtggttccctcctccaaggaacaagtccaaactctgggtccactgaaggcagctgactacttgccaccgagcacagcccgggaagtcccgcctgcctgacactccctgccagttgcagctgtggcctggagcccaccagag

SEQ ID NO: 44711 - DNA, 2300 bp, Homo sapien
aacatgggctgcccttccttcaggttctacatttcctttgaatagtccttggagcaggtgcaaatctggtttctctcaccccttgcctccctggggtggccctaagtcaccccgagtccatcccaggctaggctggcagagcatgtccagcttggcacccatcagatgctcccccatcccgtgtcaccccaggtcagaggctgcaagcggtgttctgaggaggacagctccccgggagcactcctacgtcctgtcagcggccaagaagagcactgggtgagttgccaccaactggctccaggctctaggacagctctcctctcctcagagctccagccttctctggctgatgaaagggtgggtggagagatcacccccaagggccttcctagctgagccttctcagattctcagatgtactttctagaaaatggagaggtctggcggctaccaccagggacagtgaagtgccgggaatggagagggcccaggaccctctgaggtagagcggtcttgatgtcacctgcccacgggctctgcccaaagcattgcctttctgcttcctttccagcagtcctacccaggagacacaggcaccgtttatcgcgaagaggtaagtgtcatcaagggacaccttggaggcctgttactggccacaggaaggccttccgtcagcaggggtgtagtgtgggagctgtggagaggggatgtggatgtgggggactactgtccctgagcagggggagttgtgaggggctgggggcttctgtctggaggcctggcaagcacctgggtggctgtggtagcatatgtggtcaagctcttccatttgccaatggctaatggggctgggcccctgacccaacgtggagcatttccaaggccctctgggagttgttcccctgcccctgttgcttgcctgatgccttgccttctgctctcatccaggatcaaaacctgggccatcaggagaacttcccctgggaggtgactgtgacattggagatgggccctaaagggtgaacagggcttaacagggaatgatcagaacgtcgggatactccagctgaatgagggaggggtgtcaccattagttgagacagggcaccttctggaggaggaaaatattcgggggaaagcaagaaagaaacttctggaaacttgaatttgagggacttccagttgagtggacagggaaggcctctctctgtgctgaggtggctagctggggactgcaaacccaagagaagacagcatgccaactgccccaggcagagggccccagtgcacaggcccggggtgggactagcttgctgtgttggaagaccaggaagttggcaggaatacagagagcagggatggtggcagcacaaaggaagtgacagagaacggggggcggtgggggggtcttcctggctgcatttggttcctgtggtttctgtaacgcagtaccaaaaactgagtggcttaaaacatcagaaagggattctctcccggttctggagaccagaagtctagatcaaggtgttagcagggtgggttccttctggaggctttgagggagaaaccatcccaggccactctcctggcttctgctggtggttggtgatccttggtgttcctcggcttgtacctgcatcactccagtctgtgcgtctgtcttcacatggccttctcttctctgtgtgtctgtgtccagatttccctcttcttacaaggacagcggtcattggatttaggacccatcctactccagtatgacctcatcttacctgattacatctgcaaagaccctatttccaaataaggttacagtcacaggttccaggggacatgaattttggggggacactattcaacccagtatgctgtccttatcctgagctggagtcactgaacccccagcctgggccacctcttggccgtgatcctgaagggttgggtcagttagacgccactggaagcatgttctttgaggcctccaagctctagggcagccaagaagaccacgagcgctgtttctcttcttgctcaaagggtggaggtggtggaagaggacgggccttctgagaagagccaggacccacctgctctggcaagatccactcctggctcaaacaggtaatccattgcgctcatctctgcctggggctggtggctgccatacctgccactcagtcactgaggaacctcagtcagggcacctccatgctgggcttcgagatcagtgtccccatgtgcccagtgacaagacgggacaaagaaatcagtaagagcccatctggctggatgtcccaggg

SEQ ID NO: 44712 - DNA, 2300 bp, Homo sapien
ttccccaaacgtggaaaaggataaggcttcttattatgcaacttgacagaggagaaaattgagggactcactcctgtaatgaacacacttaggaacagagcccagatccagccaactctagagccaggctcacgctactttcctctgatgtttaaacgtctgcaaaatcagaggtgttttttttttttttttttttttttgagacagagttttgctttgtcgccccagctggggtgcagtggcgcaatctcgactcactgcaacctctgcctcctgggttcaaacgattctcctgcctcagcctcctaagtagctgggattacaggcacatgccaccacgcccagctaatttttatatttttactagggatagggtttcactgtgttggccaggctggtctcaaactcctgacatcaagccatccacccatcttggcctcccaaattgctgggattacaggcgtgagccactgtgcctggccaatacaaactttcttgattacagtgtttcacaactctggctgtacttgagaatcacctaggaagtactgaaatacactgttgatgaaaaaggccatactctgtaaaatatttgaagaaattctgagccaaatgttaggactatgacccgtgacacagcctcaggaggtcctgagagcatgtgcccagggtggttcacttacagcttggttttttatgttctagggagacataagacatcaatcaatacatgtgaggtatacattagttaggtccagaaaggcctaggtatacattagttaggtccagaaaggccggacacctcaaagctgggagtgtggtgggggtgggggtgggggtggggttccaggtcataggtggattcagagattttctgattggcaattggttgaaagagttgttattctctaaagacctggaatcaatagaaaggagtgcctgggttaagataaggggttgtggagaccagagttcttatataggtgaagtctcataagtggccgcccttagaagcaatagatggccaatgtttcttattcagacctttaaaaggtgctagactctcagatcagaaaaagtcctggaaagggaaggagattctctacagaatgtaaatttcccccaggagagacagctttgccaggtcatttcaaaatatgtcaaaaaatatattttggtgtaaaatacttcaatttctttcattacctgctgtctgtcatgtgatgctatactagagtcaggttggaatttggcatattattgcttcaaggagtctgttttgtcagtctgaatatctctctcaatgttaatactggtcagttgggcatgaattccaaagggaggagaatatattgaggcatgtctgaccttcccctttctcatcatgacctgaactagtttttcacgttgtgtccccttggctgagagaagtgtccattcattcagctggggagcttagaattttatttttggtttacaacacaacaaaaacttcccgaagtcccaggtagagatttggattttatttttctggggtgggtctccatcatgtgtctttttcaaagctccccagtttgttctccttccaggctaggtcgagaaccatcgttctcaggtagtggttctgacccaggggcatctcccaaagcttccagcctgctacgatacaatgtctggagccatttttggttgtcaaaactgggagtgggagacactactggcttcttatatgcagagatctgggatgctgccccacatcccccaacacacaccatagaattatggggttcaaaatggtaatagtgctaaggttgacaaaccttgctgtagagccttgacgatctatttgggaagacagcagggacggaaaagaaaaagggatggcacagaaccacacccctcaccttccccgaaatctgggtagcgggcacaggacgtgtgcgcctgcgcgaatgcgcgctcgccaccagcgtacgcgacgcgtgcgcgcctgtgcacctcggcgagcacgcgcccgtagtgagtacgcctgcgtaggccgccatttcttgaagccccgaactcggtcgcagtgcccgccgggaaaatgcgaccgtccacaaagtgaaatggccgcccgggacgagctcggcctcggcggggattctcttgaggccatgcccgtgccggccgccagaggtcgcccgaggatcacgaatgggcccgaggagctggctgccccttcccccgcgtaaggtctgaagccgcggccagagtggctttggggtgaccgcgcgtggaccgtcgccggcgggaggaag

SEQ ID NO: 44713 - DNA, 2300 bp, Homo sapien
gctgggccaaatggcacgtggcgagcctggctgccaccgtcgtcggcacgggggtgggtggggtgaggaaccaccttgcaggaagtaggagggtttatgtcaccagtgcgcaaccgtgagcgggccgtgtgcagttccgctcatggggtaggggggcggtcgtcaccagacaacctcttcccgccacagcctcgtggcgcagtcagcacggaggcggcagccgccatagacgtgtggtggtcgcgctgcgcgggaactccggcttggaggcacctccggcaggtacggagctggaccccgggctcggacagcaacccagattacgggggaaccccccagtaactcttgctattttccacggggtctaggggctggtggccataggtttccctggaggcgggatcccactagatcacacccagcacgccaaggaatccctgccatttccaggcagaacttcagggagacctggccgggcgcggtggctcacacctgtaatcccagcactttgggaggccgaggcgggtggatcacctgaggtcaggagttggagaccagcctggccaacatggggaaaccccgtttctactaaaaatacaaaaagtagccgggcgtggtggtgtacgcctgtaatcccagctactcaggaggctgaggccggagaatcacttgaacccagggggcggaggttgcagtgagccgagatacgctactgcactccagcctgggtgacaaagccagactccgtttcagagaaaaacaaacaaacttcagggagacctattccacccttgacctgcccggagacactgcagtcaggatagtagctcttggcccttgcccttgagggaaagtggcttcgaaccttcccctcctagattctgcctgcttccactgatgtcggtggtgtgggtgtatgtagataaccgggtggggattggggggagcaggggaatggaggtaggggatttggggatatcagttagacttgcctcggggtaggagttggacttggtgagggggcagggcttggggtaggagttggactgtgggtgggggcagggcttgaggcacgagttagacttgggtggtggaaggggttagacttggtggggggctaagcttggggtagaggtgcaacttagttataggcagagtttggcagcaggggtgcaggttttgaggtggggcttaggaagggttgcaacatggctgtaggggcggagcttgggagggaatggagtttgcagtgggggtagggcagcaaccttaccttaggatcccttctgccctaccagcagcccccctgcccccaccccctacctccctcctcacctcccacccctctcaccattcgtcccccgactcctccccccgctccgctccctctgtcagttgagcagtttcttctatccctgcaccagggtcctagtgaacacctatgcagagtctgaattggcatggcctgggcagggacatgtgtgtgggacagaatcacagcaaaatacctctgctttgccttggacagatccagtgaagcaggacccatcacgcctgagtcaggaactgcctaactggatagagttgaaaagcagagcgagtctgaagtggctgtgttattgcagcatccgcgctgccagcagggccaacccagcaaggtgagcagctgtgagttgggccctgttgggaggggctctggaaccctggcaaagagtggggagaggggactgcctgccagggttcacagactctgcagggtagggccatctctagggcaagagttgttggtttcctgcagtctggcagtggggaccttatctgggtcccttttctgcctgatttcagcttccacacaattgaaaccatgagctcctgtcctttcagcactcactcctcatgcccatctcgccttccctctcccaccctcctttttgctagtacgctttattggttggaggccaatgacatcacctgttgcttttcaaggaccttggccttaccacatgacactcccctgcaatagcaacccatggtccatggtattctctgtatccatggcaacactgcagcttgtcacacaatctccacacccaccactctcattgcattgcgcagagctcagccatctttctcatccgtcaggcattcctgagaaagagggccactctacctctcttgctgccagccttcactccagcaaggagggtgctgggtgacctgagcccacatagccccgagtgagcagtgaggctgtctcctgccctcttctgcctggagggctcgtcagtgtccccaggtgt

SEQ ID NO: 44714 - DNA, 2300 bp, Homo sapien
ttcagactcagcagatcagattgcagaggtggggcccatgaatctgccccttttgtgaccccgatagtcactactggtctaagccagggcaaggccaccccggtggaggttgcttccttcatgctgtattatgtttttcactttacaagtaataatgtttatccatcagttccccaactttggtgctgctgtgttatctaccatgcaaggagatggggaagcaaaagtaattaagacatttccactggtttcaagggcaaaggttaactccaatataaaggagttctaaaacttttcaaattggacatattcacatctattgtcttgataccagtgtttccaaatccttttttcccaatgcccagaacatccacagatcactgcgtctgtctgggaacttcacaggcttctttccggagacattccagacacgcccctctgccttggcatgaatacttggcatctccccttgacatctcaagctttgtcatttactcactgtgtgaccttgggccagtagtgtcccttctctgaacctctgtttccacccctgcaagttgggcagatgaaggttcagtttgaagctggttgagcccttggagtgacaaagcaagggactgtgaatggacaaaaatgagagaaataaattctaataggcatgaagcaaccaggggagaaatagtcccaattctacccaaagactgatgggcactaatttagaatccagtctcaattctaccttcaatacggtgtgtgaccttgaaaatgtctcttaatctctctgagcctcatgagtcaaatcaggataatgttaatacctgcttcagagttctggtgaggagcaaatgaaataactcctgtaaagatgtttcaggaattctgtctgaccaggaaaaagcccttggggccatttcttcttggtccctgacaagtgccaggctgacgagcagaactcagggtggggcaggaagtcagtggacagttttgtgccccactcactgcaaggtggcctcccagacttggctggatgggtgaacctggcctgaaaatcaaccacaagccccttttcgttgtgtttggagaggagctgaagctgtgtgaataggagttgagcatgcggctggcagagcaggcaggacccacagaacacctgggcccactgcctgagggacagtcactcccttcttcatttggctgctgccctgggatcaaacggatacaatagaacccacggcgcacggctgccaaggaagggcaggcccaagggattgggctccaagtcctggaagtggtttcccaagtcactagatttgcagcgcacaaaaccggaaaggtcccggtaaacctgtccactggcacctgggcagcgaagcgctttggccggagggcctcaggtcccagcagcgggatggacagcggggagatggctgaccctccttggggtggtgtgcgtgacctgcatgagtgcctggggcatctcctgcacggaatggcacccgcaccaggtgcccctggcctcgccagccagaggaccagtcctggacggggagggggaggacaagagcaggtgaacaggccccagaacccggctccctgaccctggccataatgcagagctgcctggcgcacctcagaccactccctggccctctggtgggcacgccggggtgcagacccctcgccccgctggcacctccgtggcacgtgcgggaggggcaggagccgggaccaggaaccgctgtggtgagagccaaaggcacggggactggccgccacagacctttggccaccgcagtggggatgggggtgggcgggcgcttgtgtgcccgggggcccgggggcccccgtggcgggggggctaggggagaggagcaggtgacgtcacccggggacctggggcccccaggggcggcggcgagagcccgacctcgtgacccgtccgcgccaatggccctgcggtctcccggacgacgcggaggggtccgcgctgcaccgccgccgcgcccccgccccgtgtccgcactgcagagagccgcggcgagcaggcgccggcgcactggcccacgtgctgcgcgagcgagggagagccacagtctgagcgaacgtccgcgctgggagccaggggtgcccgacccccgtccgccgccgccgccgccgccgcgcatagcccccggagagccctctggggaccccgaccagaagggaccttgccctgggagaaggtaacagacccacctggggagggagacgctgggccccgggagactccgccgcccctcgcctgtccgccctatcagaac

SEQ ID NO: 44715 - DNA, 2300 bp, Homo sapien
cccaggtaggctcctccaggtcccatgtggcctgggggccagtgggcatgttcagctcaaagtccacagggtgggtatttaggggtggttggatgagcaggacagaacccccagccgtaccttcttcagcttctgcttctttggggtccccatctgaggcccaggcaccccatgtgctggatgcagtggctccctgctttcctctccagcacctcttcggggacctggacctgacccccactgagcctgttgccaggtggtcttggttgctgaagtcccttccagctggccaagggtgagaaggcttggccttggtctggctgccctgtccctctgccccactcaactcatctgctgtttgtctgggcttctctttcccctccttccaatatctcttttgtctccttggcctgtggtaggaaatgttgccctgttctcccgagcctacttggccttggacttgggatggctcttgtcccaagcccagttcccgtttcccgactcaactgcagcctgtttcttctgctttaccaagagcaggttggaggggttgatgcactgtaccctgatgtggccgtcttccccacagctatagcagaatgtgtggcgtttccgttttcttgagcctcgagagccagcccttgccacaccaccccttcggtgttggcctctgcccctccggcgccggtagccctgggaaggcctcacatcaaaactgttgccagaggcagggagaggtactgccccaaccccagtgatcctggcaggtggccttggggctacttccagcccctccagactctccctatctggacctaaagtggcctcccattcctcctcctcacgcaggagcttcaccagggccaggaaaccaggaggcttccttcgctgtttcatcagcttaagcttatctcggagtttgtcaggaagggtggccccacttaagactcgtttcaggcgagtctgattcacgtttctacgtgataccacattgttttctacagctctttggagcaggggttccaaacgtaacacaaagctagatactttctctcctgcctcctgataggctttacacaacttcacctgggcaattttatggctctccacaggtccgaacacctgctgcaaggcagccaggcactcctccacagttatggaagcattgctggcccggagcccactgaccacctggagagcagggccccgtaagcattccatcagcctccgcctcttttccccctcgggcacctgccacatctgtagcatctcagtggtgtgctcaagccaggcatcaaaggccagtgcacctgggatggatatggtgttcccagaaaacactcttagttctcggtacaacatttgttctagcagaggctgcactgctgcccccagagtctgggcccaggtccagaactctggtgatatagtcactcttggagccgaacaattggtgtccgacccgaggactcggttcatatctgacacggtccgcctctcctcctctaagaagcggttcagtctgttgagaaattccccatctgagttacggggttttacaatcacttcccagggccccccctttcctggtatttcccttgggagcaaagcatagtcgatatcttgtgccagctccagtagaatcgcctgggcgttctcctccctcctaaacatcctgccaatcaccctgtatctgcccaggtgcctgcaagcctcctggagtgtctcctcaaactcatcctcgccacagtcctcggggatccccaggatgagcatgcacctccgggtgttcaggtgttccccccgacaccagtcctgtaacaaggtcaacggcatgtcctcgaatctctgcggatactaatttggggggagtgatcagggcgtgaggcacatatctggatcaactcctagggtgatcgcagaaggcccaggtctccacagcctgtgaatgcgagcagggcgagagcgaggttaatgcccacctctccgcacgcccacatccacgcccacccccacccccacccccagccgccctcctccccgtgcggcgcctctgcagccaggcccggcccatgcccagccccccacccccaccccccgtggggtctctgcgggcctcagccccctccccgcgctgccccaggaccctggacccctgccctgcaggctgcttcagttctgatagggcggacaggcgaggggcggcggagtctcccggggcccagcgtctccctccccaggtgggtctgttaccttctcccagggcaaggtcccttctggtcggggtccccagagggctc

SEQ ID NO: 44716 - DNA, 2300 bp, Homo sapien
ctggggaccccgaccagaagggaccttgccctgggagaaggtaacagacccacctggggagggagacgctgggccccgggagactccgccgcccctcgcctgtccgccctatcagaactgaagcagcctgcagggcaggggtccagggtcctggggcagcgcggggagggggctgaggcccgcagagaccccacggggggtgggggtggggggctgggcatgggccgggcctggctgcagaggcgccgcacggggaggagggcggctgggggtgggggtgggggtgggcgtggatgtgggcgtgcggagaggtgggcattaacctcgctctcgccctgctcgcattcacaggctgtggagacctgggccttctgcgatcaccctaggagttgatccagatatgtgcctcacgccctgatcactccccccaaattagtatccgcagagattcgaggacatgccgttgaccttgttacaggactggtgtcggggggaacacctgaacacccggaggtgcatgctcatcctggggatccccgaggactgtggcgaggatgagtttgaggagacactccaggaggcttgcaggcacctgggcagatacagggtgattggcaggatgtttaggagggaggagaacgcccaggcgattctactggagctggcacaagatatcgactatgctttgctcccaagggaaataccaggaaagggggggccctgggaagtgattgtaaaaccccgtaactcagatggggaatttctcaacagactgaaccgcttcttagaggaggagaggcggaccgtgtcagatatgaaccgagtcctcgggtcggacaccaattgttcggctccaagagtgactatatcaccagagttctggacctgggcccagactctgggggcagcagtgcagcctctgctagaacaaatgttgtaccgagaactaagagtgttttctgggaacaccatatccatcccaggtgcactggcctttgatgcctggcttgagcacaccactgagatgctacagatgtggcaggtgcccgagggggaaaagaggcggaggctgatggaatgcttacggggccctgctctccaggtggtcagtgggctccgggccagcaatgcttccataactgtggaggagtgcctggctgccttgcagcaggtgttcggacctgtggagagccataaaattgcccaggtgaagttgtgtaaagcctatcaggaggcaggagagaaagtatctagctttgtgttacgtttggaacccctgctccaaagagctgtagaaaacaatgtggtatcacgtagaaacgtgaatcagactcgcctgaaacgagtcttaagtggggccacccttcctgacaaactccgagataagcttaagctgatgaaacagcgaaggaagcctcctggtttcctggccctggtgaagctcctgcgtgaggaggaggaatgggaggccactttaggtccagatagggagagtctggaggggctggaagtagccccaaggccacctgccaggatcactggggttggggcagtacctctccctgcctctggcaacagttttgatgtgaggccttcccagggctaccggcgccggaggggcagaggccaacaccgaaggggtggtgtggcaagggctggctctcgaggctcaagaaaacggaaacgccacacattctgctatagctgtggggaagacggccacatcagggtacagtgcatcaacccctccaacctgctcttggtaaagcagaagaaacaggctgcagttgagtcgggaaacgggaactgggcttgggacaagagccatcccaagtccaaggccaagtaggctcgggagaacagggcaacatttcctaccacaggccaaggagacaaaagagatattggaaggaggggaaagagaagcccagacaaacagcagatgagttgagtggggcagagggacagggcagccagaccaaggccaagccttctcacccttggccagctggaagggacttcagcaaccaagaccacctggcaacaggctcagtgggggtcaggtccaggtccccgaagaggtgctggagaggaaagcagggagccactgcatccagcacatggggtgcctgggcctcagatggggaccccaaagaagcagaagctgaagaaggtacggctgggggttctgtcctgctcatccaaccacccctaaatacccaccctgtggactttgagctgaacatgcccactggcccccaggccacatgggacctggaggagcctacctggggcctgcc

SEQ ID NO: 44717 - DNA, 2300 bp, Homo sapien
cagtcttccgtgatagcttttgttatcaggcattcgtgcatgggaaccctgcctaggtggccctccacagctctatttgtcaggtttttggatttttgtttgcttgaacaacaagtgactccatcttgattctgaaacctttcacaaccatacgggcaagccaaagtctaattgtgaggcccactccaatgcgacctgcttctgggcaacgtgatagactggccatggcttatatcacaaaaggagaaaggcttcgatcttgacgctaggaactttctcctggaaacgggccgatgacgcctgtcatctgcgagatgaggaggaaaggagcaaaggagattcacagaagaggaaccaggaacggccagtgagaggatgcacgacctcgccaccgctcggggaaacgcaaggcacacagcgatgaggtggtgtctctccccgtgggatgggcaagcaggcgaggctggacaggaccaaaggctgctcgggctgtaggaacccaggaccgctcccacgctgccagtgcgagggaacatgggttcagccacgcaccggaggtcacagatgagcaatgcttggttgtggcgttgataggcacagcccaagtcccagcagagccactgcctgctgtgcaccccagagtctttctggctgacggtggtggctcagacaggcatgcgggatgccactggcagcagtgtctgcaacagccaaacagtgggaaggaccggaatgtccatccccagggtcatagacaaatactctggggctgtgattcagcaaggagcttgggcgagctggacgcttgggggaaaccttggccagcaagttgccaaacaggaggtcaggcaaggaaagagaaggggatgagggaacgacacccagaggtgtgaccccgtgggaacctgtttgccacctgcctggtggagatgctgttcacatggccccagcctcccatgatgggtcaggtgcagggtggtcagatccacgggcgcagaatctctgttttgagcggaggctgctctgccctggcgcagtgtctagccccggcaacagaggactggggaaggacctatggaaggctgactcaggccctgacagacggaggtctccagggaggtacgacacccatgctgccctcagggccaagagagcaatgtcccagagcccatcaggctggtgagggcacagggggcaggggacaaattgagtagcccactccgcgcggactacctttccaggcacacactcaggcagagacccagactcgggacttgcggctgcaaaacggacgaggcccgggcatacttgggtgctgggtcaccctcctaggtgctggctcctggcaccagggcagcaaagtgcttcggccggagggctgcgggtccctgaagccggatgggcagcggggagatggcagaccctccgtaggatggtgtgcgtgagctgcgtgagcgcctggggcatctcctccacggaatggcacccgcaccaggtgcccctggcctcgcctggccttgccagccagaggaccagtcctggacggggagggggaggacaagagcaggtgcacaggccccagaacccggctccctgaccctggccagaacgcagagctgccggacgcacctcagaccactccctggccctctggtgggcacgccggggtgcacacccgtcgccccgctggcgcctgcctccggggcacgtgcgggaggggcagaggcctggaccaggaaccgctgtggtgagagccaaaggcgctgggacctgcggcccacagacctttggacaccccggtgggggtgggggtgggctggcgcctgtgttcccgggacccgcggcgcgaggggagtgggggtggggctaggggataggagcaggtgacgtcacccggggtcctggggcgctcgggaaggcggcgagagccaggccacgtgacccgcccgcggcaacggccctgcgctctcccgggccggcgacgcggaggggtccgcgctgcaccgccgccgcaccccggccgcgtgaccgcactgcagagagcggctgcgagcaggcgcctgcgcaccggcccaaacgccgagcgagcgagggagaggcacagtcagagggaacgcccgcgcggggagccaggggcgcccgaccccgccgccgccgcagcggcgcgcagcccccgacgcgccctgtggggacccggaccaggagggaccctgccccgggaaaaggtatcagacccacccggggagggggacgctgggtcccgggagactccgccgcccctcgcctgtccgccctaacag

SEQ ID NO: 44718 - DNA, 2300 bp, Homo sapien
acaggcgtgaaccaccgtgcctgggagtaaaacatattactttgaggacaaaaggtttgccaagtgtagctctggctggagagaagcccccgtgggaaggtgtgcgtcttctcccagaggtcactacaatcgcgggagctgccactctgcagggagcacctggcctgggacctgcagccattctctgcaatgggtgcagctgggcaaatgctcagagatggcagaaacagcatctcccgcccatgacttcaacaaagtgccaggagctgggaggaggaccttcctgagtggggacagagggtccactctcccgacgtagatgggccacagaatgcagctcagcccctcctgtcagccctggaagaccctggcaatgttaccacgaccacaccccccctcccattgccacctcatgggactgggggccagagacttggtgggagagaagcagacacaatcggcagagaatatgggtgtccagattctgccaggcatgaaagtcaggaccctgaggggtgaccgagggtcccccaaccccacgcccaaccccactaccaccaacacgacgacttaagccccggggcaccactggcatccctccccctaccacccccaatccctccctttacgccacccatccaaacatcttcacgctcacccccagcccaagccaggcagaatccggttccacccctgctctcaacccagggaagcccaggtgcccagatgtgacgccactgacttgagcattagtggttagagagaagcgaggttttcggtctgaggggcggcttgagatcggtggagggaagcgggcccaggctctgtaaggaggcaaggtgacatgctgagggaggactgaggacccacttaccccagatagaggaccccaaataatcccttcatgccagtcctggaccatctggtggtggacttctcaggctgggccacccccagcccccttgctgcttaaaccactggggactctgaagtcagagctcgtgtgatcagggaagggctgcttaggagagggcagcgtccaggctctgccagacatcatgctcaggattctcaaggagggctgagggtccctaagaccccactcccgtgacccaacccccactccaatgctcactcccgtgacccaaccccctcttcattgtcattccaacccccaccccacatcccccaccccatccctcaaccctgatgcccatccgcccagccattccaccctcacccccacccccacccccacgcccactcccacccccacccaggcaggatccggttcccgccaggaaacatccgggtgcccggatgtgacgccactgacttgcgcattgtggggcagagagaagcgaggtttccattctgagggacggcgtagagttcggccgaaggaacctgacccaggctctgtgaggaggcaaggtgagaggctgagggaggactgaggaccccgccactccaaatagagagccccaaatattccagcgccgcccttgctgccagccctggcccacccgcgggaagacgtctcagcctgggctgcccccagacccctgctccaaaagccttgagagacaccaggttcttctccccaagctctggaatcagaggttgctgtgaccagggcaggactggttaggagagggcagggcacaggctctgccaggcatcaagatcagcacccaagagggagggctgtgggcccccaagactgcactccaatccccactcccaccccattcgcattcccattccccacccaacccccatctcctcagctacacctccacccccatccctactcctactccgtcacctgaccaccaccctccagccccagcaccagccccaacccttctgccacctcaccctcactgcccccaaccccaccctcatctctctcatgtgccccactcccatcgcctcccccattctggcagaatccggtttgcccctgctctcaacccagggaagccctggatggcccgatgtgaaaccactgacttgaacctcacagatctgagagaagccaggttcatttaatggttctgaggggcggcttgagatccactgaggggagtggttttaggctctgtgaggaggcaaggtgagatgctgagggaggactgaggaggcacacaccccaggtagatggccccaaaatgatccagtaccacccctgctgccagccctggaccacccggccaggacagatgtctcagctggaccaccccccgtcccgtcccactgccacttaacccacagggcaatctgtagtcatagcttat

SEQ ID NO: 44719 - DNA, 2300 bp, Homo sapien
tggtaattgtgtttgacacttgcagtctcggttggagggggggtggcagcagggatactggggaggtctgtaccctgcctagactgcagttgacaaaatggttacaatgaaagttttcaaatttccacttcacatcattacacagtctgaggcagctcctcaaaacatgatgctagtagccctagggcaacagcaggacaccagttaaacagggctggttaagacagtatggatcaagagttccactaataacaaccagacaccaacatagtgggtgagaaattgtgtttcaaaaaaaattatttcaacagaacgtaaagaatggaaaagaagtagaataggatataagagtgaatcatgcatactactggtaggtattctttcctagaaataaatacatatatatatacagctacctacatatatccttggaagatacgaaaagtgtatttctttttcattttttaaattttttgagacagagtgtcactctgtcgcgaggcccacgctagagttcaatggcacgatctcgcctcactgcaaactccgcctccaggtgcaagcgattctcacgcctcagcctcctgagcactaccacacccagctaatttttgtattttgtgtagagacggggtttcactatgttggccaggctggtcttgaacccctgacctcaagtgatctgcccgcctcggcctctcaaactgttgggattacaggcgtgaaccaccgtgcctgggagtaaaacatattactttgaggacaaaaggtttgccaagtgtagctctggctggagagaagcccccgtgggaaggtgtgcgtcttctcccagaggtcactacaatcgcgggagctgccactctgcagggagcacctggcctgggacctgcagccattctctgcaatgggtgcagctgggcaaatgctcagagatggcagaaacagcatctcccgcccatgacttcaacaaagtgccaggagctgggaggaggaccttcctgagtggggacagagggtccactctcccgacgtagatgggccacagaatgcagctcagcccctcctgtcagccctggaagaccctggcaatgttaccacgaccacaccccccctcccattgccacctcatgggactgggggccagagacttggtgggagagaagcagacacaatcggcagagaatatgggtgtccagattctgccaggcatgaaagtcaggaccctgaggggtgaccgagggtcccccaaccccacgcccaaccccactaccaccaacacgacgacttaagccccggggcaccactggcatccctccccctaccacccccaatccctccctttacgccacccatccaaacatcttcacgctcacccccagcccaagccaggcagaatccggttccacccctgctctcaacccagggaagcccaggtgcccagatgtgacgccactgacttgagcattagtggttagagagaagcgaggttttcggtctgaggggcggcttgagatcggtggagggaagcgggcccaggctctgtaaggaggcaaggtgacatgctgagggaggactgaggacccacttaccccagatagaggaccccaaataatcccttcatgccagtcctggaccatctggtggtggacttctcaggctgggccacccccagcccccttgctgcttaaaccactggggactctgaagtcagagctcgtgtgatcagggaagggctgcttaggagagggcagcgtccaggctctgccagacatcatgctcaggattctcaaggagggctgagggtccctaagaccccactcccgtgacccaacccccactccaatgctcactcccgtgacccaaccccctcttcattgtcattccaacccccaccccacatcccccaccccatccctcaaccctgatgcccatccgcccagccattccaccctcacccccacccccacccccacgcccactcccacccccacccaggcaggatccggttcccgccaggaaacatccgggtgcccggatgtgacgccactgacttgcgcattgtggggcagagagaagcgaggtttccattctgagggacggcgtagagttcggccgaaggaacctgacccaggctctgtgaggaggcaaggtgagaggctgagggaggactgaggaccccgccactccaaatagagagccccaaatattccagcgccgcccttgctgccagccctggcccacccgcgggaagacgtctcagcctgggctgcccccagacccctgctccaaaagccttgaga

SEQ ID NO: 44720 - DNA, 2300 bp, Homo sapien
gtgtgtgtgaaagcttatcaagttgtttagctgaaacatgacaaattcacagtttattgtctgtcaaatatatctcagtgtaaacagacaacctacagaatgggagaaaatcacctgacaaaggtctaatatccagaatataaccccatcaaaaaatgggcaaaagacgtgaacagacacttctcaaaagaagacatacaagtggccaaaaaacatatgaaaaaaatgctctcatcactaatcatcagagaaatgcaaatcaaaaccacaatgggacactatctcactccagtgagaatggccattatttaaaagtcaaaaaataagagatgctggagagactgtggagaaaaggggatacttatacactgctgatgggaatgtaaattatttcagccactgtggaaagcagtttggagatttctcaaacaacttataacagagctaccatttgacccagcaatcccagtactgggtatatactcaaaggaaaataaatcattctaccaccaagacacatgcacctgtatggtcatcacagcactattcacaatagcaaagacgtggaatcaacctaggtgatcatcagtggtggattggataaagaaaatgtggtaggcattcaccacagaatgctatgcagccataaaaaaagaatgaaatcatgtcctttgcagcaacatggatgcagctagaggctgttatcctaagtgaattaatgcaggaacataaaaccaaatgccacacattctcatttataagtgggagctaaacatcgggtactcgtgcgcataaagatgggaacaacaaacaatgggaactacaagaggggtcagggaaggaggggtcaagggtttaaaaactaactattgtgtactatgttcagtacttggatgacagggtcattcgtaccccaaacctcaacatcacacactatacccaggcaacaaacctgcacatgtaccccctaaatctaaaatgaaagttgaaaacataaaatttctcaggaactacatgtgtgtgtatatatatatacatacatacacacacacatatatacacacacattgcacataatgggctagctttctcttttgtctctctctctatatatacacacacacatatatatacatatatatatactgcacataacattgggcaaactacttgaacagacactttacaaagaaagatatagaaatggccagtgagcacataaaagcatactcaacataattagtcatcagggagatgataattgaaataacaatgagatgccacttcccaccctttcaaatggctaaaaataaaggctgacaacctcaaatgttgatgaggatgggaaagaaaaggagctcgcatacatttctggtgggaatgtaaattgcacaaccactttggaatacattctggcagtttcttataaaacataaaactatcctgtgatgtggcaattcatctcttaggtatttgcccaagaaaaatgaaagcatatgtccacacaaagatgtgtacatgaatattcatagtagctttatttataatcgcccaaactggaaacagcccagatcataacctggtgaatgaacaaaccaactctgatatatccaaacaatagcatactactcagcgatagcacattcaacaacatagataaatcttgaaaacatcacgttgaatgaaagaatccagacacacaatagtacatacgatctgattccattcatacagaatactggctttccagtcttcgccctcagttcccgacccttcactccccccaccaccatcttgaagatgcccaagggggagaggtcccttccattccttcgttccttccttcgtctgctggtcgatttgttcgctcgttcattcattcattcgcacgctcattccactcctccccacctccacccaagcgtccagcccgcgcgcgccgctcccccgcaggctgatcagacttgcctgcccagtccgcccccgcccaaaccccgcccccttcccgccacgcccccttcccgggccaatcggggacgagactggggccggggcggggcctcgctccctcagaacccccggcggcgctcacggctccggaaacgcgccgcggggctgttagctcggctgggcacgggcggctccgtggcgcttcctgccacgccaggcctgcctgggccgcgccagcgccgctccaccgagggccgcgcgtcggccgccgccgggcctgggtgagtgtgcgggccgcgggaggatgtgcggggggcgctggaggggccgcagggcggaggtgatcgtgg

SEQ ID NO: 44721 - DNA, 2300 bp, Homo sapien
gctcctctccacgcagcaacatcatttctttcctctggctatttgaagactttctctttatcactggttttacagcagtctgattattatgggtcttttaaagtcttgctaggggttgattgactttcttggacgtgtgagcttacagttttcatcaaatttggaaaactgtcctgccattatttcttcaactgtatttttcatccctccccccacttttcctcaccttctcaggttccagttatgtaggtgttagaccactttctcttaccccaggtcattaagatgctgtttgtttttaaaaactctttttctctctgagcttcatttgagatcatttctattgctatgtcatcaagttctctaattttcttgtgtggtatctaatctgctgttaatcacatctagtaaaattttcactttaaatatcatagttcccacctccagaagttccatttggttctttttatatcttctatttctctcactatattcctgtttttcttttaatgcttgtacatcattaaactcgctgttatccttgtctgtgagtcatcactggtcatttctgtgtgtttttattaactgattattctccttgtcctggccacatttctgtgctttttggcgtttcagtaacttctgattggatgttgggtattataaagattatattattgagtgtctggatttggggtggtagttacttgtggatcagtatgatccctttgaggcctatttttaagctttctttgagacaggtcttttgtagctttggctctaggaatagatcagccctactactaaggcctctggattctctgctgcatgtcccaggtgatcacagaggactctctatactggttgatcagaccttgaatgtctccctacctttgtgtgtcctgagaattgttcagcttacagcttcctggtcacccttttcctgggcttttggagtttcactctatgcatgcatgggcctagtagtcaggaaagactcaaggggaggcttatacagattttttgaagctctttttactgcataactaactcctttctggaactctgctctgcaacttccagctgcctcagctgctctgaatgctggcctgtgtctcctcaacttggcgaagccactaagctctatttggttctcgcccaccccaacacacagtctcgatctggaaattgcctccaggcagagagctggggcaatgatagggctcccgtcatctgtttctcttctcttggggatcatgattctgtgcttcctgctgtccagtgtctgaaaacttgtttcacatatattttctccatttttttctacttatttatggcacgatgtgaaatctgttccttgttactccatcgcagccaaacgtggaagtttctgtccattctttttcacataacatctttaattttatataagagtctttctggagtagctggattttgtgggccttgagccagtgtaagagccttccttttcactgaattatgagttgaattgaattgaattgtcatcacaacaggaactgtgtagctgtttcttagaattcactgaagtgggaggcctgtgatgcacggatgccggtggttgaatctttcacatattttgcaatttggaagaagaagataatttgtacaaatcattcagctcttttatttaacaatttagtgtttgaagatcttttctttgaggcttatttttccagctgttttgttccacttttcatttgggttgaacacgttagagaactgctgtcatgtgtacctgtcttgctgtcaccgggctccttgtgtcagtgggctgtggcttttaagggcctcactgctggtctagaagcccccattcctgctctcttccctccagcatcttcatccggttttttgttgcctctacaaagttggaaagggtctctcatttcctggttatttcttctgatgatcttggtgtgcctccttcctgtgcagcatcagcatggacttctaggcttgccagtctccctgcccttggctttctgtctaggtctgtcttctcctagctgtgcctgggctggcatctgctggtcttgtcttggctccctctggcctgcctctgttcattctttgccaggctactttccccattgttcaagatgtgttttctcaggcatctccgtgccctggcttgtcattcagccagcatgtgagagaagactcaacaagatcagaaaccaaggaagaagaaatcaccagtctcttcccaggggatccagggacagggctgtcgtcactcatggcctttttcactttct

SEQ ID NO: 44722 - DNA, 2300 bp, Homo sapien
ccgtcaaggggggtggtatcgctccacccacccagagctgcacctggggtaggagaatcgacagctgtgatgagcatgggcccctgccagaagccagggagactggggcagtggagagagtcatgttgtctcctcctgttggctcccatcgggatgtgcatcccggagccggagggatgggatgtccttctgcagttgggctgctggctccacggctgagccgttggcatttagaagggccaggaaactggggcctgctcctgcccctgacttctctgaggcagtggtcaccaggcagagggccagccacaggccaccaagaggaccgaactcctgctcccacccctatgcagcctagggatgattctcaagtcccaaagccatgttatcccattcccagtccctgagggaggagctgaggatctggccttgtcttctgctcccacctggaattccgatttggggagccctagctgcggtgaggggaggctgagtgaaagacccctttctgccaagggagagctcagagttccaggcaaaccagcctccccatcagggtgcttcctcttccctccaagtgcccagcaagcactggaataacattcccagcaggggccacaacagcacctggaccccaggagggggcagtttccaagtgcaaggacaagtatagaaccccatggcatggagaaaggagcaaggaaagtggtaaatgaaggtttgacaaaagacgtcaaggaagaccaatgccatttaacatatatttattgaaatctacttgatgcaaggcactgtgctagatttggtaggggatcagacatgaaaggccacccctgtcttctaagagctcacaatttaatgggtgggggagggctgaggaggagggggtgaagccaagtccacaaacagctctagtgcaaggctgattatagtgagtgccagaaaacagacaaggtaatgagatgggggaatgagaaaaaagtgccaacaaccaacggaaatacaaactggggtgggacatagctattgttctcagagatacgcaaatgacattgagggccaagtttaaagagacagtttctgcttttcaaagtaaacatccaaagtgatgcaatgagaactacagaatgtaagtacatgagtaagagagaagttagcaatccccccatctgatggacatgctggaaatcgtgaaacacttcaaaaataagagaacagggtgcactgtgatttcactcattttatggcccgcatgtggtgggttcagtaaaggaacaatatacgtagacataaaatcacaggttaaattcactgagactagaaggcatcgactttcacccatcttagagaacagagaacacacgtttgaacaggtgttcatgcagtcaggtgcgacttggccaggaagcagccaagtggcaaaacacaatagaaaagagtagagacccactcaagctggctcaagtcaaggagtctgtagtggggacgcacgtggaccaatgagggctgctgccagaaatccaagaacataccatggccaggccttcctcccagcaggcgccacgctcctcactcctctgagtactgtgctgctccccacaccttctgatgcctagaagcttctgtttccttgtttgcatttcagatctggaaggcctggtggtgtccgtggtccatcatgttctgtcagctctatgctctgatgattgcttgctgcccttgggtcaggtgttcagttctggctgaattaatatggcctagaagcggggtggcaaatcacatggtacgcaacagggccacaacccagggctgcaggtagggcaggcgctgtgccagttctaggacaaaatcaagcacatggaatgcaacaccactcaaaaacatgcccgctgcaattgggtagggactattctggaaatgcaagagtggggtgacacagctaatggacacagctcatcgtaataagcagcaaaaatggtaatcaattactttcttttgaaaattttcacaagtattcaaaactctaataaaagcaatggaggatttttttcaaatggtaggaaaagaacatatttcttttttttttttctttttccatgccaggcagttaatgtgctgacatagtaacaaggtttgaaggaggaacatctcatgcacgtgcgtggaaacccaattgtcatgtgtatgaactacaaaaggatcgggaaaagaacacatttcctcacaacaggaatacatgagattagaaagaaaaccggaatgaggtagatgcatgaatgcacagacaaggatatgtgaca

SEQ ID NO: 44723 - DNA, 2300 bp, Homo sapien
ttatttgtttattttatttatttattttatatatatatatttttattatactttaagttctagggtacatgtgcacaacgtgcaggttagttacatatgtatacatgtgccacgttggtgtgctgcacccattaactcgtcatttacattaggtatatctcctaatgctatccctcctccctccccccaccccacaacaggccccagtgtgtgatgttccccttcctgtgtccaagtgttctcattgttcagttcccacctatgagtgagaacatgcggtgtttggttttttgtccttgcgatagtttgctgagaatgatggtttccagcttcatccatgtccctacaaaggacatgaactcatctttttttatgggccgcgtagtattccatggtgtatatgtgccatattttcttaatccagtctatcagtgttggacatttgggttggttccaagtctttgctattgtgaatagtgctgcaataaacatacgtgtgcatgtgtctgtatagcagcatgatttatagtcctttgggtatatacccagtaatgggatggctgggtcaaatggtatttctagttctagatccctgaggaatcgccacactgacttccacaatggtggaactagtttacactcccaccatccttttggtttcttttctttcctctgcagctaccaagatgaatgaactaatggagaaatagaaagtcttcagtgatggcctacgccaaagcacaggatggggcgggcaggaagccctctcccaagatcgagttggccgaggatggatgattgtggcagcagaagccgttgcagccccacgttgtgctctaggcagggacctttggcccctttggggagggagagacagacgggcggtttgacttggacacaaagaaagccttggtttctaagcagttgcctccagcctgctttctgcttcctcagctctatgtctctctccttccccttgtcctgagctgctcaggtggcccaggtctgggcaggctggcggcggccctcctgtcatcttggcgggcctgggctgcgtcctcttcctgtggctccactcctccctgctgctgccagccacttgaaagcagagaacccactgtcgcctcccccggctggccttagggtcctgtgcgagacgcacccctcagccgccctccttgagtgcccctggatcccccgcggggtaccagtttcctgctcctccctggctgggcgctcagctctgggctggggaattcagcctgactggttgtccaggaagatgctgtctgggcttcccagggtgacccagtatctccctgagcagtgtgcctgtcacagctgcctccctccctgtgagtaccggaacaggcgtgactggtagggcctctgcctccttggggccattgtacctgctgctgcccgccccaccctgctccctcctggcaccatctcctttgcttccccaaggtccctgtgggcacacaaggcaaggaggccaggaggagccaggtgccagacccccctccatcccagtcgcctgaggcatcccccagccaccactgtgagaggtgggaggccgggcaggcctgtggtcaccatggtgcaggtgcaccacctgatttataggccaagggactcctcttggtcacctctctgtgcccccagcatggggctggccctgcagtgcacccaccatcaagggctgttgtctcttgctccagaatgaggtcttcagggcgccactgctcgcaggaccgggaaggacctggtgccctttgcctggagcgggatagacagggcaggtccctgagcctggggtccgaggggctgggcttcactcctcctgtagtcccggcgctcctggcccaccccctaacgttgcttatctgtggtggaggaagcattagctcagctgcggcctgcacagctcccgggccaggcccacctcccttccttccccagcagccactgttaggtgcacggtagacatgatgaagcgacgtccttaaagcagatagcatctcccgaggctgccccatccctaggttttgggggagcaccccttcccctttggaggctgagcacggcatgtgtgggcaccttggtcacactccagagctcgcttcatccccacgagcggcacctgatctccagtgacggggagactgaggcctggcaaagaggacctgttgcctttgtgtaactggccccagcatgggggaggcattggccccagcatgggggaggcattgaccccaggcctgccaggcctggcagccacagcctggctaggtgga

SEQ ID NO: 44724 - DNA, 2300 bp, Homo sapien
tccacatccccgcccacccacctccctgggcttgtagaccttctaggaccgggagctcccttcctctcctggcagccagctggtgttcagacagtgatttctgggaggagtgctttcttggactgagcttgagtccacatttccagaagcttctacctctgggccccttctttcccccttcctgagaggcccagcagcctctctgttccctccccagcctccagcttttccggaggaagatgcctgggaggtgctatgattctgggggcgggtggtgggtggcaggtggtgggtggtgggtggtgggtggtggggtggcgtgggcagggaagctgcagcctgctgctgggtcttcagcgaccatctccaggggctgagggctggccaacaggttctccatgagggggatggcctccataacctctcaagatgatcttcgcctctcaaggccctgccagttcctcagggtcccatagactgaactgctgaggttggggaggcctgttgagcacactggctccgtggagctgggtggaggagggagattttcttccagagtacacaggagctggtttcttcccggtcctcaggagcagagaatatggggagggttgggggaggctgccacactgccgtggtttcttccgccaaattccccagtcctaggaaagatccacagaaaaacccacaagaatttgaatgtctgagctggggctgtgattgagatgaaattttctaaaaagaaagaaagaaaaacaaaaacaaaaaagagggaaaaaaacgcttaaaaaaaaatcccaaagcctttgacagccctcagctaccagaagggcctgaggcagcagccacgtggaagggtagagagcaaccttgaggcacttcgctgggcctgtgtcggggcctcccaggctgaggtcccttcctgtgacccccggactcctgcccgctccctcctcccaggacggagtgaagtcccctcctgtcacttggatgactgcagttgcctcccagcaggtccctgggtctccctgactatagacttgccccctgatcccaccctccaggagatggcagggtagggcacagaggagggcacagtggcagctgcctgctgctgtctcctggctactgggcacaagccaccctccaactccttcctgccttgcccaatcagcaggtccctgggtaaggggcattcagtgaactgggggctttgcaggtctgggggaggagcgactgacatatttcattgcagacgcattgagtttgagggtcctgagggatgtagaaaaatttgttaagtagacaggataggaaggagccacaggtagccccaggagccgtgaggggagcagggcccagcatgtattacaatagtgagcatttacgtggttcttcgcatgcgccgggcactgttctagggattccacaggaattattaccgcctgccatcctcattagcaacccagtgggtaaggtgctctcattagctccattaggtgagggcaaagaggcacagagaggttaggtaactggttcaaaggcacacagctggtgagtgacaagaaatttccttctaactacagcgtgagcatggtgaagagaagacggagccccgcgctgggagaggaacgcttcagtccgagttccattctgcacccaaggctccccttggtcctcctgggaaccagggtgccccttagtggtggtggcccaggagaacccgaccaaggcaggagcgccccctcctggaagagcctcgcttcaacgcatcatcattcccggccggcagcaggggcgacgccagcaaggcctgcgactcagagccagcttggcccgttcgccccgccccttcccggtgtccgccccgcccctttcccggtgtccgccccgcctccttcccggtgtccgccccgcccccttccctgtgtccgccccgcccccttccctgtgtccgccctgcccgcttcactgtggtcctgcctctgggtggtgccggggcggggggtgggagcccggggcccgcgcaggcggagatgtcgcccaatgggaagggtcggtcgggaagggggtgggcgcaggcgggtgggcgggaagaacgctggaggttgattggcggtcttgccggccagtgaagccagggcatgggcggggcgcggctcggagcgcgaaacatggcggggcaggacgctggctgcggccgtggcggcgacgactactcagaggacgagggcgacagcagcgtgtccagggcggctgtggaggtgttcgggaagctgaaggtgctgttggcccagaaa

SEQ ID NO: 44725 - DNA, 2300 bp, Homo sapien
cccacggtattcagagctgtttcacccccactgggactcctggaggctgaggccctgagtgacagctcctgggttctcagtccccaagcagtgcaggaaggtactgggtaccagcacctcgggcagcaggcatgccttgagtgggtttctccttttttctgaaacggctttactgagagtggctgtgcttaccacacgatttgcgcattgagcacgtacaaggcaagggcttttatatggtctattcacagaactgtgcaaccatcactcagtcgattgtagaacattttcatcacctcaaaaagaaaacccatacctttaggtaccacccctctagcacccactgcccacaaatccgctttctgtccccacagatgagcctagtgtggacatttcaaatgaatggaaccagaggctctgcggccttttgcgactggctgctgtcactgagcggaatgtttccaaatgcttctctctccacccagactgctagtcaggcttcgctgcctgtcccgctctctaccgacatatttctccacgaatgagttggcagtgggggagggaaagagggtgggacagagatgagaccaggctgccaagagtcggacgctgaggctgggcaaaaggtaaaacacacaaacctgccgaaagacaagccatctcctttgtctggaaagggcatatgtggtctccaatctcctcattccaaccatgaaatcaagagagaaccagggttaccagcctggcccctggtttcccacgtctctcttctccctggcccagtctagaagcttcttgcaggcaggtaccacagtttggtcaaggtgccatgcgtcccaggtcctagccaggccctgggctgccgctggtgaacaggaagggggtctgtgccctgccatgcccccaggtagagctcccctgggagcatcctccctggcctgggacctcccagaccccaccccccggttgagtgatggcactgccaggggttgaagaccctcagccctcgacgttgtcctctctccattggatgccgcctctctctagccacccctctctccctctctgccccttcgagctttttctctcaatatgcaattttctcttttggtcttccgcactcttggcccccagttctattgcagatctgtttctcactccatctaaactcttacccctgtgtctcaggagctgctcttgctgagggaagaaggggacactacgggacaggggggcagtgtcgtactaaggacctgggctctagccactggaggaactggactcatttgggccctcaggaagcggctgagtcttggtggggtaacccggttagcccccgtaagtgaccagcacagggctgagcccagaggaagtggccacccacagagtggttctcatgtccgaggggacctgcagggattgagcaagaagactgactcgctggatccttcgtctctgaatcagttcagggcaggcaagctggggagccccctgccccgtcctgccaccaccagccggatcgggccctctttttaagggaagaaagtctggagtggaagggagggcacagggcgccaggagcctacatgaagtccttccagaaatccacaacagctacctctctgatcctggagaaaccacctccttgcttaggcccaagcaggttcctggcaggctcaggaccaaattccaggggccactcatgggcctagcagcccaaggccgcctccccctcgtctttcttccatctctctttcctctgcctggcgagatgccagccagcacctcagtgtccccatctgggcagtggaaagtttgactctctgggtccttgtttgagtgagtgcgagtgtgtccgttcctttgctgtctgccccaggcgggggagggggggggaggtggtgggggcgagggggcgggggctcagctagtccagccgtctacaagaaaattgctccctttgaagctgccaggggggccgggaagcctgccccctcctgctcgcccgccctctccgccccaccagccccctccctcctttcctccctccccgccctctccccgctgtcccctccccgtcggcccgcctgcccagcctttagcctcccgcccgccgcctctgtctccctctctccacaaactgcccaggagtgagtagctgctttcggtccgccggacacaccggacagatagacgtgcggacggcccaccaccccagcccgccaactagtcagcctgcgcctggcgcctcccctctccaggtagggctggcttcaagctgcctcctcagcaacccagag

SEQ ID NO: 44726 - DNA, 2300 bp, Homo sapien
gcctcaggccaggaggactgagccatgcgccctccccacagcgcagcccctctgcacacaccccacagctggtccctctaagacttgcggaaagggctctgagtggccgagctgtggcccctgatctcccaacccagcatctgagcagaagaggacaggagctggggcactgatcgccccaggcccggtcggcagggtgggggccagggccggcaggatcccgggttgcgctgccttccgagggagccggtgcccacccagcggcctgcagcccaaggcagggtgccctgggaaagccaccgccacccccagcccctcggtgtgagcaagacccccagctggtgggtccccacccaccagtggggctcccaggcctgtcgggggctcggtggtgggcctggatgctaggggggcaacgtgcggcagggaccaagctctccggcccacagatgagtgggagggggtcgtggtgggcatgggaagacatttccgacaagcaggggtgttggggggtgagcaaggcaggggaggggccctggcaggtggggtgccagggaccccagggctggggctaggcctgtgggtggggcgtgtgctggggattctgtgggccgaggacatgtgactcccgggcaggctggagatgctggggggtggggggtggggggtgggcccgggaagcacaggagacggcaggtggggaggtcctcatcccacctctatacggggtggcaaggactcagaagcccttgctgaaggctctgagtgctaactgtcaagtgtgaactcattacaaacccctcctctggggacttggcgctgtcactggaagggacacgctatagctttgtttgagtgactctggaatgttgctaaagacaggaaactcattcttgccttggaaacaccccccttcctttcccagactccccatctatgcgttggtagggttaatgcccactgccgtacgggtccttggggcttgaaggtgggccagggaggccagggctgccacccacagctggccagcttgccatgggagccctctctgctccctggctcgcaacctgctcccaccgcccagccctggtggcttggaggcagccctgcatcttcctttcaatatacccacacgggcttgccctcaaaggctcaccatgctggcccacagtggccatacatgggcatgctccgcaccaagacatccatgctcatacaccagctctcctggggtgcggctggcaccggcggctgggtgtcaccaggaggtgctcacccgcacccctgggcgctggtccccgggagcctttctggcacgggggcaggggggctgagcatctccagcttgtctcagttccaattagttgctatagggcagagagctggcaggccagggaggggcgagggcccagaaacaggaccccctgaggatgggacctgagcagtctggcagccaggacagcaggagagaggcctgcccaccaagacagaccactggagactgatgtaccctgtgccctgcagatccctgggccccctgctctgctcagcaggcgctcaggcacccagccccgcccatggagcagtgagggggcgctcccctccgtgggccttccagggcactctctcgctccctctcctgggtcccttggcaggcccctctgggaccccaagccaggtccgccctggggagcatggcacagttgcctgattttctctccttcccctccacacccattctgagtcccagtccaagggggtcctggaaacagacagggctgagccacccaggcacccccagtcagggcccttgcagccagggctcccaggacccagacttctcacagaggatgtagaggcagagcattaacctgggggtgagcgagcgaggaacatctgggcagggtgcctggggtgtgcctgggaaactaagtctttcagcccatgccaaggactggcctcaggcagtgcagcggaggactgctcctgggtgctgagctcggtgggcgctgggcggtcctccccgatccgacccaacccgggccaggcgccaagccctggagcaaggaggcgcctgggcagagcgaggctgagggagtggagcatgcgcctgggacttgcaatgatgaaacagggccattggcaaagctggggtaccagtcacccagccacgctctagggtggtagccaagaagacggaccccgagcgggaggcagagagacaagaggtggatgaagcagagcaaggtcagaagggagagggagaggaaggggtgagggaaaggtgcctggagggcggc

SEQ ID NO: 44727 - DNA, 2300 bp, Homo sapien
atggtatccagggagctcagggcacactttggtggggcttgaaaccctccctgaagtccctgaagacacacccagagaggccaatgaagggaaactgaggcccagaggcctcagttgtggtggtggagagttgaggactggagggacttgctgtgggtctcacaggatctgactatggggtattcctgcttcctgggctggggtccccgcctgccttatctatgtgtggatatatgtgtatgtatgtgtatatgtatacatatgtatatgtgaatgtgtgtatgcatgtgtgtatagatgtgtgcatgtatgtgtgtacatatgtgtatgcgtgtatacaggtgtatatgtgcaggtatgtatgtatgtatgtgtgcatgtatgcatgtgtgtgtgtgtgtacgtgtgtataaatgtgtatgtgtgcgtgtgtgtgcatgtgtgtgcatgtgtgtatgtgtgcatgtgtgcatgtgtgtatacatgcatgcatgtgcgcatgtggatgtacatgtgcatgtatgtgtatagatgtgtgcatgagtgtgtgtgcatctgtgtatatatgtgtgtatatgtgtatcatatgtgtatgtgaatgtgtatacatgggtatgcatgtgtgagtgtctaggtgtgtgcatgtatatgtgtgtacatgtgtgtataggtgtgtgcacgtatatgtgtggatgtgtgcatgtatgtggatgcatgtggatgtgtgtacatatgtgttttgtataggtgtgtgcatgtgtgtgtgcacgtgtgtacatatgtgttttgtataggtgtgtgcgtgtgcacgtgtgtgtatgtgagcgtgtatgtgtgcatctgtgtgtgtgtttgtgtgtgtatgtgtgtacgtgtgtgtgtgtgcatgttctggcaggagggaggggcttggtgtgaggtggtggggagaaggcaggggccaggctttgggaggacagctgagcctatactgccaggacctcccaaactgccacccccagtcttgggcattcaggctctcacaggcccagagacatggctggagccctgtggctgaggagcacagctgagagctcaggcggggcctggaggcgccaaagctgagttccaagtcaggctgagtgacttgggagaaatcagagcctctctctcggccttagcttttgtgtccataaaatggggatactcatcaggccagctccaggggatcctatccttccccccaggctcccctggctccctctgacttcatgggccccttgctgcctcctgtgggctcagacacggagcctgccccttcctcgggagaggtctcagttttgtgccagttctttgaggggaaatgagggatgtgccgggaagcctgcccggcccccgcccctccagcctgcccactgcttgggcacagccatgagccatggaaaaccagccaaaccttgtccttctgcctctgtcacggggcccgggtgtatgggccttccagccctcagcctccctccccgctctgagggaacctcttccccttgcccctttctcagtctcttggagaccccccagacatcctactgtatcaggcagcctgcctccagagccctcgttgccccacagctggtcccgggaacccgcctgagaccccgatggccagtcttgccgtgactggcctgccctgtgcctgtgccccctgccctggtggagggcccgattccctaacaggagggcctgcagggaagtcccagctcctggggagaccccttgccccggggcaggagtccctgtagagtcctcctccaggccaatgcgtgggtcctggggggctccaagctggccatggtcagatggtcctctgtcccctcggccttccccagcccctccccacagcctcccgtaggcccagccggaccaccccaaccctacctgtccaggtggactgcccaccctggagcttgccagggctctggcggggtgtcccagccctgactcactctccctgggaggtagcggctttggcaggggcatcggcaaggaggggcagggcagtctcctccctcccccactccatcttgctctcctgcttccaccctgcccttcctgttctctcccactgctcctcctcctcctcctccttctgcccccgggtgtccactggcactgggagagggtcctacagcggcagcaggcatcggaggccctgccctgccctggaggaagggaaacaccatccaggtaggtgagtgttgagccttctccctacttgggggccaagaccctccgggcggttcccctaggttctgctgggccgg

SEQ ID NO: 44728 - DNA, 2300 bp, Homo sapien
cctaccacacaagccattcactctgtcacccgctgggggcacagagcctgaacctgacagtggcacaaagttgctacatggtgggattgttgaggcatgaggtgactggagctcaggaaggcagggagaaggcgccctggcaggtgcaccgtcacaagcaaaggtcctggggtggggaggggaggctgtctcgagaagacgaggagtccaggtgagagccgaaagctgccattgctgccttgaggggtcagaagtgggacacccagctgtcctctggctctgccacttccccaagccagcctcagtttcccgcatcagaaaagcaagggcaattcgtccacacagcacccccagaaggagcccgcctcacctgggacagcttcgcttgctgtcctggccccctctcctcagctttcactccttctagtcttttccccccaatgcctgtccccagacgccttgcctcacctttgccccagctgcaaccccacagctcttggccctcgggcctgctgttctccctgtcccagctagagagggacggggttagttgaaacttgttgagcacctgtcccagcacatcaagccagtgccaggcatgtagtagctgctcggtgaatatgtgtcaggtgaccaactgcaagacagggcggggagaggtggggagagaggacggcacaggcacatggccatcattttgtccccacatctcccagaagtgaaggctgcttcatgtgcaatgtgtcgcgagagtaaacgcgcaggtgcccacgcttttcaaacatgggtcactgtggatggatgtttcgtgaagtatccaccagggcctctcctgagaataaggccatggacttggccgtgtctgctttggctgcctgagggctttctcccctttcttcagggctctgggccactcgtttccaacggatgcttctgagccaggagcttccccagagacgggggttcagggccctgctgagctgccaggagggctcttggctgatgtcaaggccaggccatgtgcactgaggccatttcagttccatgaggatgtgacaggcttagctcgggccgggaaggagcggagagagaggagctgcagtgggccccgccaaacactgtgatggctgcagaaggggcagcctgggccctagcggatccttgggtaaggtgacggggacagggagagggatgacaactttgcgatgctcggcagagtggggccagggccgtggcctggatgctttcagtgtggggagactttggctccttactttgtcatctggagggaagaagagcgtggaggggagtgggtggcaccatgctgtgggctgggacgttggcagactcaccagcgacctgtggctgctttggctttctcctgtgtaccctctcctcctctcctcctcagccactccctttatcccctccctcttctccctccctccatccccctttccctccctctctttgcctttccgtcttgtccctctctcccctcccctgtttcccacccttcctccgggcctcctcctttcctcgcccctggccccccaggtactctcagggccacagaaaccgtgagccactaaggccacaccagaagaccaccagggactcatggcatgcccgctgcacagggcgcatcttaaccaggcaagagcagggagtgaaccggagtgaacaagcgcaggactggtggtggggcgcgggcaagaccagccactgatcagtcccagcacgctgccctcacttcagcgtgggttcccgaatggatctggggggcagtgacagcctctgcctccagctagctagtgttaaccactgcagggtcctggcaggaggcatcgacacttcccctcccccacctgggcaagccctccaggttctgggcacccatggtgggcaggacccgggagtggcctggctggtggggcctggcagagcatgagggccactggcccagcctgggaggtgatttctgcacttcgagggtcatggcacagactgagtgaagatttgccgagaatattctggaagatgggacctcagttttgtctcaaccactcccctggcttcttctcgcctccatctccccaggtgtccacgcttagcagctttctcaccgccgccaaaccttgcctgggcactgggaccgtgggtggccgcctgtccctagctgtggctgagccaagattgcacttgtgagaaggcctgacaggcagcatgggcgacatggccaatagttccatcgagttccaccccaagccccagcagcagcgggatgtcccccaggctgg

SEQ ID NO: 44729 - DNA, 2300 bp, Homo sapien
tgatcccccaaggcccatagctgctttagggaacatgggcttgagccttccagatctagctgtggctggtccagcccagggcactgtctgggggaacacaggacctggcctccaccaacggggctgaggggaggtgggccctctgggcattgcctaggtttcagccttgggctggggaagagggtggggctgctcacagcttgcagacagacacggtgctcaaggcgtggcaggtgtcagcagcacagggagctggggaccctgagtcagtccacacacgcacacatatgcacacacacgtgcacacccgcgcacatacagacaagagcaagctgggtgatggaagtggagtggtaattccttcaccaggcagaatacgtgcagagacgttcagccaggagaccataacctttgggggacctgccgaaggtctctgccatgaggcaaagtggtgagatccgaggctggtcagttgatagggtgactccacaaggaccagcatgtgaggtcaaggcctcacattttctcctgaaggtgaagggactccggagggtgttaggcagggcaggacctgttcagcctcgccttttagaaagctcgctctggcggctggtattgtggggtgaatgccagcccccaaaaggtgtgtccgtgtcctaatccctgttactgtgaccttatttagcagaagggcctttgcaagatgtaatgaaaataaggatgtcaagatgagctcctcctggattatctaggtaggccctaatccagtgacaggtgtgcttataagagacagacgagaagacagggagaaggccatgtagagacggaggcacagattggagtgatggggccacaagcccaggaagaactcaggctgcagaagctggaagagcaaggaagaactgatcctctgccagagcctttgagggagcaaagccctagtgtcacctccatttcaggtgtctggcctccagaattgagagaggatatacttctgctgtttttagcaacccaatttgtggtcatttgttacagcagccccaggaaactaacccagctgggatggagagaggacttggggaggctggtggaggcaggaagtgctgaggaaggagaatgaggccggactgggtgtgtggggtgggggtaagaggtggagacttccacaccatcaggagatcaaggcgcctgggcagaagggtttagggagcagtagctttttcctctccatattgccagctgtctgaaattgtagcaatgatctgaatgtatcagaatgactccagtgactgtcactaacttgggagtgagtacctttggggttctatgtccctaaagcctgatgcaccatttcctgcttgtggaagacgcgaatgaaaaatgagatggtaaatacctgagttcgatattcagcattcattcagcaaacatttattaggctcctactgtgcgtcgcgctggaaaggcaagcagaagctagattcccaatcgatcccgggaggctggacgatccagacacaaacaccgttcatgcgtctattcgaaaaggccctcttggaattttgtgcacagcatttccttggggtgtcgatggatcggggtctgcaaacattagcaccttttccggtggccgctgtcttctcagacctcagacaccggcgcctccccgtgaactcccgcaggcgtccctagcccagggcttggcgggcgctgccggttgtacctggcctaagccacgctgggccgacagcccggggcgacacccccttcggacggcggggatttgcggctcgggtgaccggaggtgccctcccgcgggtctcggagcagctccgcgggctctcgctccgcggggaggagcctgcgtctcccaggggcggggctcgaggcgcctaggggccggtggacacataccagccgccccgtggtgtcggcctctgcgcctgcgcctgcgcctgcgcgcgcggccaggcagcgtctgtggcgcaagcgcgcgctcacccttgggcgagggccctgaggggcggggcggggcggaggagcggcggggcggcgaggggcggggcggggcggcgaggggcggggcggggcggcgaggggcggggcggggcggggccggacgcggccgggtggggcggcacgcccgccgcgagcacctccagttctgccggcttctgcgcgccggggccgcctctccttccgccggtgccgcggcgcctcatggaagccccggaggcggcggaggggggcctgcagcgcggggcccggagggcagccggcgcccgaagccagggtgcact

SEQ ID NO: 44730 - DNA, 2300 bp, Homo sapien
tccgggcaggcctggcctttgcatgctcctcttccggcaacggatgggtcttgttgcctggagagcagagacaccaggagggctgggagtgggagctgtgcaggggcgagggtggcattcttcaatccaaatgtttctccgccagcctctcagccctgagtcactaaagcacaggatggtggcggaggggaggatgttaacaaaccttgctagaagctcctccgagtcagctcacccaccaagcctttgccgggggtcagctgggcacccaggccatgggcacagctgtcgtacgtccttcccaaacaggaggtgccctcagtggagggggagtgtgaaaggcagtcccctgtttgtagggcacagcttctatggaatattgatttcttaggaaaggttccgtaacttcagcacgtctagcagtacgggcaccagtggcagctgcatgtgctcgcctgcgtggcatagccttgggtaggtgcaagctcaagtcctgggcagcctgactccccaaggctgtaggggagagccccagtgcagtcccatgaggcccagcgtccagagcaggaagacagttgcagggccagaggcctgctcccaggaggggctgtgctgccgccaaggctgaaaaggtgcagaggagcagtcggggcccagagcagggtgggcaggcctggctggcgacagcaggaccctcccagctcacgcaccatggcttgaaactgcagcacagctaggagggtccttggagatcacatggtcccacctctctccccaaacgtacataccaggaaatggagacccagatgggacagggacctgggctccagaggcaaagctgctgccctcgcctcttccaggggtaatgactcaggggaattcagcgctgcggcagacacagccaagcggccagcggagctgctggcatcccagccctgcctggccgcaccttatcctgcgctccctgggcggagaagacggcccttgatgctcacagcctcctgccgggtctcaggcaatcccccactgcaggcacgaggccgggctcatacactgctggtctgggagccccagaaaggccaggtgcacatctccacgggctgtcctctgcctcccctccccacgcaatcttccgcactcacactcgctcaggctctaggcttctgaactcagccagcccaagccacatcctactctgccactacactattgtgccaccaccagggagccacggactcagtttccctggctgtagcatggggacaatcccctcagacttccggaactgctgtaaggataaaatgaggtccttgatggcaatgcgtgtgacctttggcacaaaggagaaagctaacgggacctagtgacaacagccgctccctactcgcttccagcccctcccccacccaaacgtcctggctccaccccttccaggcactgaggctcaaatgctattactattagccagaatctgacacatgagaatgagaggagacactgcagggggacctggggtgggggatggaattggcagcgctgtcagccagactttataccctcttcactgtgggagcaggaggtggctctggggcaccaagttgcgcccagtcctcaatgggccccttcgctggggtgccagtgcagattctgcgcgtaaccgtccacctagcccaggcccagcctagttcagggcccccaaccccactcccgcgccccaagcgccggagcccccactcattggcgccactggggaccggggagcgcagggcgcgtcgggcaggactggcctagagaacagaggcttgcaggtgggaggaaggcggcggggggtggggggggcgtgggaggtggagggagacgccgggcaggccgcggcccctccccgctccctccccgcgagccgccagctacagtgcccctcctgggcagggggcggagaagacggcgactggaggggaggaggcggcggcagaggcggaggaggcagcggcggcggaggcgggatttggagtttccctccgcagcggcggcggcggctgcccctcggctccaggagaggccgccacccggggttccggtggcgttaggctgcagcagtggcgcttcccgccgcccgagcttcggaaacttcccggccgcgacgcagggaaccggcgcggagaaccgagcagagcggaggtgagtggagcaagcggcgccccggggacccccaccccccacccggcctggctgcccccgccccgacgtgcgctcctccaccctgcacccccaaagtcctgacaacgcacaccccacgaagc

SEQ ID NO: 44731 - DNA, 2300 bp, Homo sapien
cgcaccttatcctgcgctccctgggcggagaagacggcccttgatgctcacagcctcctgccgggtctcaggcaatcccccactgcaggcacgaggccgggctcatacactgctggtctgggagccccagaaaggccaggtgcacatctccacgggctgtcctctgcctcccctccccacgcaatcttccgcactcacactcgctcaggctctaggcttctgaactcagccagcccaagccacatcctactctgccactacactattgtgccaccaccagggagccacggactcagtttccctggctgtagcatggggacaatcccctcagacttccggaactgctgtaaggataaaatgaggtccttgatggcaatgcgtgtgacctttggcacaaaggagaaagctaacgggacctagtgacaacagccgctccctactcgcttccagcccctcccccacccaaacgtcctggctccaccccttccaggcactgaggctcaaatgctattactattagccagaatctgacacatgagaatgagaggagacactgcagggggacctggggtgggggatggaattggcagcgctgtcagccagactttataccctcttcactgtgggagcaggaggtggctctggggcaccaagttgcgcccagtcctcaatgggccccttcgctggggtgccagtgcagattctgcgcgtaaccgtccacctagcccaggcccagcctagttcagggcccccaaccccactcccgcgccccaagcgccggagcccccactcattggcgccactggggaccggggagcgcagggcgcgtcgggcaggactggcctagagaacagaggcttgcaggtgggaggaaggcggcggggggtggggggggcgtgggaggtggagggagacgccgggcaggccgcggcccctccccgctccctccccgcgagccgccagctacagtgcccctcctgggcagggggcggagaagacggcgactggaggggaggaggcggcggcagaggcggaggaggcagcggcggcggaggcgggatttggagtttccctccgcagcggcggcggcggctgcccctcggctccaggagaggccgccacccggggttccggtggcgttaggctgcagcagtggcgcttcccgccgcccgagcttcggaaacttcccggccgcgacgcagggaaccggcgcggagaaccgagcagagcggaggtgagtggagcaagcggcgccccggggacccccaccccccacccggcctggctgcccccgccccgacgtgcgctcctccaccctgcacccccaaagtcctgacaacgcacaccccacgaagccggcgcacgcgcccctacgacacccattcggtgctgctccgcacacccccgcacgccgcccgtgcacctcccgtgtctcctgccacttgcaccggctgcacactcgcgcgcatacaaaccacgcaccacagacccgggtgcctgtagtgcacacactagctgcccctgccccaccactcaccactgtccccaactcatgccaacccaccgagaccctgccacgccccagtacacacccaggcgcacacgcacgcttccaacacgtctctgccatacctgcaccaacatagctccccctaccatgcccccaccacctcgaactccccatctgcccattacagacaccccacccacgttgccagcccagagacactgcagtccacccatcctggagcgaggtcccgtcagaaacccacatcccagtggctgacgctccccacgtcccaggcacacacctccagcatctccaacgcgcactctcatccaccccagcacgcgcgcacacctgctggattcacgctctccagcatcctgccccgcccccatcacaaatagccttcgacaccccccagcacatctctgagtccctccctccctcacccccaacacctggcacgcgggctctagaggctgcagcatttggtggcatccctgccaggcacctctggctccccttcggcagaggctcagcagccttgggccccccaggtgcctccctaaacagaccttgagactccccagcgactagcttggcctcttccctaagaaataaagaaggcactttggggtccaaggtagggtacttagatgtggaagcaaggggccccggggaggggcggggaggcggcggagagagcccggcgctgaaatggaggcggcccaggtgggaccaaaggggcgccagctgcccggcaagcacgtagtaggtgggttccatgggggct

SEQ ID NO: 44732 - DNA, 2300 bp, Homo sapien
ccactgtggagctaggctgtggacagaaaacagaagacaaagtccctgccccaggaacacactgagaaagggggaaagtgaccacactagggagcacagaggagggagactactggctccgagttgggaaggctgcctggaggagggggcctgaagaatgagcagaatctcagaatctgggcagggggcataggagggaggcctgggctggggcccttgcccactgggtgagagaaggaagggcacagtccagctgcccaaagcccttggatgcaggaattaggactcttgttagacgcagggacatggggggtgtggccggaaagcagcccagtgccagggtcctgggagtccccggctagcagcccactgcccgaaagggagggagagaggcaaactggaagccccttagaggtgacccacctagctttccgtcacctgccctcttacctaaccatgacctgagacattttctcctctaactccatggctcctgagaggagtctttagactcgtagtttgctttgcattttccacttgttagaaaaatgctttgtggtgcccatcctcgtgtgcataactttgctttcttttactttagttccttagattcccaaaagtggtcaaagggttgggattttttcctagctcttgatattgccagattaatttccaaaggggccgtaccaatatataaccctgcaacagttgaacagcacgctgatttcacagcaatcttgccagcactgcgtgttctcaaaaatgagaacatttctaatgcagtaggtgggaagtgttacctcgttggtcattgttacttgtttattggagtggctttccttccacgcctgaagttgaaccttcccccaaatatttgttaggccaccgcattccctccttcctgcagtatgcagtgttttcaggttctttgcccatttatctacaggggtcttaaccttttagttgggtatgagctttatcttatctggcgtacattttccttcaacactgttatttgcttttgttgagctttaagcagagaagggacttttagccagatcagcattgtggacacctccccctgaccctggtctcctgcctcagtgctcaccacacctgagaccttgtccagtgctcttgctgcctgtggatctgtcccgcctgttgtgcccatggaggaaaggatggaggccaccagccttggttgagtggatggcattctgacgttgggcagggctgggcagggcagggtggagggcaggtcgttgcaggcccggaggcagggagactgttgtgcaagacgtgacagtgacctggcctaaagctgatgaatttgagccctcggctagggcaagggacaggggagagaggcgtggatgtgagagatatttaggtagaaactagttctttccactttgattagccgaaggggggttaagggaaggaggcagaggggggagccacgggtgactcttaggatcagtaatgtgataagagcagagtgccccagtttagggctgggagctcagggttcctgggtgcttttggccagtcctgtgcgagtgaagcgggctggtattggtaggtatccaggagctacccctgcctgcctagccctgcagcagacctctgggccaaagctgcactaagtttctggtcctgcctcctcctcccctccgtgatttcggtggcatcccaagtttgcccaagctgctagctctgagcccattacagagatggggccactgagatccaggcaggggagaagatgctccagtatcaccctgtgagttgggctggaggcagcttctgcggcagaggggctgggctctggtcctcacccctccccctgcctcccgaggccaggctggcgccggccaggggagccgcagctggtcccctgctgggcccctgacctgcccttggcctctgccccgaccccgtcccgcctcggtggaagccccagctcagccgactcgcaggtcccacccgactgcttcggctagcacccgttggctcaccggcccgccgggcccgcccccggagccccgccccggcccgcccctcggagttgtaactccacgtccgaaggcagtttccaaggtggaagctgggtccggctgccaggaagcggccggtgcgcgggctgcgcgggctgcgcggggctcggcttccacgtgcgagcctgcaccgccgccccgccctctcctggcggccaggcctggggactctctgccgcgggacggcgcctcgcgttccgccgtggcagtggccgtggccagaacgtccacgcgcggtcg

SEQ ID NO: 44733 - DNA, 2300 bp, Homo sapien
ctgaagtgctgggattacaggcataagccaccttgccaggccggagggtgtaatttctcttgtaaacacacaatataggcctggtgcggtggctcacgcctgtaatcccagcactttgggatgctgaggcaggcagatcacctgaggtcaggagttcgagaccagcctggccaacatggtaaaaccctgcctctactaaaaatacaaaaattagcttggtgtggtggcatgcacctgtagtcccagctactcgaggctgaggcgggagaattgcttgaacccaggaggcagaggctgcagtgagctgagatggcactactgcactccagcctgggcgacagtgagaccctgtctcaaacaacaacaacaataacaaaccaaaaaaaaccccatgatacaatgattcaaacaaaaactgtgccatcagcttttacatgaggccagggccacctgagtcacctcgtggaccaatacctgcccgctggctcgtctttcccaggcccactttggaggtgggtgctttccttctggcctccagtttccatctgctgcccctcagataggtctctttgtgccatctctttccacgcgggcagttttttattacttttctggggcacagaaatatgtgtatttctatttctttttataacccaggaccatgttgtagaactctgcttgggcaaagcaccattggcgtattagacattctggggaactatctgtaggtatctgtaaacaaattgcacttcctgctgtcatgagaaggggctcaccatcagttccattcctatttttttctgttttagatgtcggtcccaggaaaccattttcacatagaggagcaggtgggactggagtttctgagtgctggggtccctggagccttctgcagtgtcctgggaggggtgactgggaaaggccagggggcaagagctgctaggggccttctcagatttcccagtttttacacagagtatatatgggagttgaggtctggaaaaatgattttttaaaaactcttcctgccccgtggactctcttgaagacgtcgtgtcatgccagggcccacggtcacttgacggaacccttgtgatgctggccacaacctcatgggactggatggcgagcagcgaggggggtccagtaactgttggatgcaggattgaattcggtcacccgcacttatttcctgggctcgtcttggttgggttcgcggagatacactctctgggagcggacgctttggtgaggaagaccaggcgaagaaggtgatttttgcggttggacgttctaaagacagggcagggttatgcggagagaattggcaggggcagggcgggggaggccggtttgaggaggggacatttgagccgagatctgatggaacgaggagccaagccaggcagatatctgatcgaagaacattccaggcaggggagcaaaggctagggccgtcaggaggccagtgtggccggggaagaggtggaggaggaggggccagggcagtcgttaggccgccccctaaggactcatgctttgacttggattgacatagagagctgcaggagggtgacatgatctcaataaaaggaatgctctggctgctgggtagagaagaaagcgagggtgagggattaatggtggagccagagggagcccagtgagtgccgggagcccagggtggcagagctgtggtgcagggttgcagggtcctggagctaggcatggaggctgctttcgggcaagtggccgggtcagcctgtcctcggagaggcggtgaaggcagagactggaaggcagagagccttgccgacctgtggccgaagagctctccgggagacagccaccggtggtgcaaaggccctggggccggcccagccgggccgcagctccgggaggcggcgcgagcgagcagtgggctgggcggtggcggccggcacccgagccggatcccggcgattgccttacaaggtgccctgcggcgccgcggccgcgctgggccactgcgtgcttgggcggctggcgggggcgtgcgcggagggggcggggccggcggggcgcgggcggggggcttggcgctgcggccactgcgcggcacgacgctgcggcacccgctccaggtctgcacctgctccggggcgcggggacgcgcggggcgggggcgcaccggatccggcccgcggccgccgcagccttgcgcgtccgcagcacacctgtcacgcctggcgcgccccctgcccgcacgcgctcggtccacgcagctcgggacgcgggcggcccaggctgccaggtccccc

SEQ ID NO: 44734 - DNA, 2300 bp, Homo sapien
aactttgaagaggaactttttactttctacactccatctcaaaaaaaaaaaaaaaaaaagaaaagaaaaaaaagaaaagaaaagctatgttgcccaggctaggctggaactcctgggctcaagtgatcctccagcctcagcctcctgaagtgctgggattacaggcataagccaccttgccaggccggagggtgtaatttctcttgtaaacacacaatataggcctggtgcggtggctcacgcctgtaatcccagcactttgggatgctgaggcaggcagatcacctgaggtcaggagttcgagaccagcctggccaacatggtaaaaccctgcctctactaaaaatacaaaaattagcttggtgtggtggcatgcacctgtagtcccagctactcgaggctgaggcgggagaattgcttgaacccaggaggcagaggctgcagtgagctgagatggcactactgcactccagcctgggcgacagtgagaccctgtctcaaacaacaacaacaataacaaaccaaaaaaaaccccatgatacaatgattcaaacaaaaactgtgccatcagcttttacatgaggccagggccacctgagtcacctcgtggaccaatacctgcccgctggctcgtctttcccaggcccactttggaggtgggtgctttccttctggcctccagtttccatctgctgcccctcagataggtctctttgtgccatctctttccacgcgggcagttttttattacttttctggggcacagaaatatgtgtatttctatttctttttataacccaggaccatgttgtagaactctgcttgggcaaagcaccattggcgtattagacattctggggaactatctgtaggtatctgtaaacaaattgcacttcctgctgtcatgagaaggggctcaccatcagttccattcctatttttttctgttttagatgtcggtcccaggaaaccattttcacatagaggagcaggtgggactggagtttctgagtgctggggtccctggagccttctgcagtgtcctgggaggggtgactgggaaaggccagggggcaagagctgctaggggccttctcagatttcccagtttttacacagagtatatatgggagttgaggtctggaaaaatgattttttaaaaactcttcctgccccgtggactctcttgaagacgtcgtgtcatgccagggcccacggtcacttgacggaacccttgtgatgctggccacaacctcatgggactggatggcgagcagcgaggggggtccagtaactgttggatgcaggattgaattcggtcacccgcacttatttcctgggctcgtcttggttgggttcgcggagatacactctctgggagcggacgctttggtgaggaagaccaggcgaagaaggtgatttttgcggttggacgttctaaagacagggcagggttatgcggagagaattggcaggggcagggcgggggaggccggtttgaggaggggacatttgagccgagatctgatggaacgaggagccaagccaggcagatatctgatcgaagaacattccaggcaggggagcaaaggctagggccgtcaggaggccagtgtggccggggaagaggtggaggaggaggggccagggcagtcgttaggccgccccctaaggactcatgctttgacttggattgacatagagagctgcaggagggtgacatgatctcaataaaaggaatgctctggctgctgggtagagaagaaagcgagggtgagggattaatggtggagccagagggagcccagtgagtgccgggagcccagggtggcagagctgtggtgcagggttgcagggtcctggagctaggcatggaggctgctttcgggcaagtggccgggtcagcctgtcctcggagaggcggtgaaggcagagactggaaggcagagagccttgccgacctgtggccgaagagctctccgggagacagccaccggtggtgcaaaggccctggggccggcccagccgggccgcagctccgggaggcggcgcgagcgagcagtgggctgggcggtggcggccggcacccgagccggatcccggcgattgccttacaaggtgccctgcggcgccgcggccgcgctgggccactgcgtgcttgggcggctggcgggggcgtgcgcggagggggcggggccggcggggcgcgggcggggggcttggcgctgcggccactgcgcggcacgacgctgcggcacccgctccaggtctgcacctgctccggggcgcggggacgcgcg

SEQ ID NO: 44735 - DNA, 2300 bp, Homo sapien
tgcagccagacctcacaatctaacctaaaacccgattggctagtagtttaaaacttttgaaaatagataaaagtaatggaaggataaaggaaaagaggaagttgcttacgaaacggcttagaaaagtaataatattccccaataggaaagggagataggctgcgagctgggacatgcctgtgagcacgtccagcacagatatcttggttaaagtacaaggacatagaatgtactacgtgcctgtaagcatgtttaacagctacataggatagggcttaacaaagagttattagcacaaagcaaggaggcttgaaggaagttagtctttaaaagaaactattatttctaaacttatgatttattttttaataagaagggaaactttgaagaggaactttttactttctacactccatctcaaaaaaaaaaaaaaaaaaagaaaagaaaaaaaagaaaagaaaagctatgttgcccaggctaggctggaactcctgggctcaagtgatcctccagcctcagcctcctgaagtgctgggattacaggcataagccaccttgccaggccggagggtgtaatttctcttgtaaacacacaatataggcctggtgcggtggctcacgcctgtaatcccagcactttgggatgctgaggcaggcagatcacctgaggtcaggagttcgagaccagcctggccaacatggtaaaaccctgcctctactaaaaatacaaaaattagcttggtgtggtggcatgcacctgtagtcccagctactcgaggctgaggcgggagaattgcttgaacccaggaggcagaggctgcagtgagctgagatggcactactgcactccagcctgggcgacagtgagaccctgtctcaaacaacaacaacaataacaaaccaaaaaaaaccccatgatacaatgattcaaacaaaaactgtgccatcagcttttacatgaggccagggccacctgagtcacctcgtggaccaatacctgcccgctggctcgtctttcccaggcccactttggaggtgggtgctttccttctggcctccagtttccatctgctgcccctcagataggtctctttgtgccatctctttccacgcgggcagttttttattacttttctggggcacagaaatatgtgtatttctatttctttttataacccaggaccatgttgtagaactctgcttgggcaaagcaccattggcgtattagacattctggggaactatctgtaggtatctgtaaacaaattgcacttcctgctgtcatgagaaggggctcaccatcagttccattcctatttttttctgttttagatgtcggtcccaggaaaccattttcacatagaggagcaggtgggactggagtttctgagtgctggggtccctggagccttctgcagtgtcctgggaggggtgactgggaaaggccagggggcaagagctgctaggggccttctcagatttcccagtttttacacagagtatatatgggagttgaggtctggaaaaatgattttttaaaaactcttcctgccccgtggactctcttgaagacgtcgtgtcatgccagggcccacggtcacttgacggaacccttgtgatgctggccacaacctcatgggactggatggcgagcagcgaggggggtccagtaactgttggatgcaggattgaattcggtcacccgcacttatttcctgggctcgtcttggttgggttcgcggagatacactctctgggagcggacgctttggtgaggaagaccaggcgaagaaggtgatttttgcggttggacgttctaaagacagggcagggttatgcggagagaattggcaggggcagggcgggggaggccggtttgaggaggggacatttgagccgagatctgatggaacgaggagccaagccaggcagatatctgatcgaagaacattccaggcaggggagcaaaggctagggccgtcaggaggccagtgtggccggggaagaggtggaggaggaggggccagggcagtcgttaggccgccccctaaggactcatgctttgacttggattgacatagagagctgcaggagggtgacatgatctcaataaaaggaatgctctggctgctgggtagagaagaaagcgagggtgagggattaatggtggagccagagggagcccagtgagtgccgggagcccagggtggcagagctgtggtgcagggttgcagggtcctggagctaggcatggaggctgctttcgggcaagtggccgggtcagcctgtcctcggagagg

SEQ ID NO: 44736 - DNA, 2300 bp, Homo sapien
ttcacagtcactatggggtccagaccagctgggggcgggaggcagggcctggcccaggggctggtagtgggtgcaccccaggctgggctggcaaagggcggggaagaaggtgggtgtgggaaggggtggctgcctggagaagagcccagttccaggaggtcgtgggagtcaggtatgggggcccactggacctcccctcagatgtgggggctcccactccgagggtccatggagcagtggcagccattctggacagccccccacccttcacttctgtctccagtaccctccagcctggccacctcgccctctgcctcggcctcctctgatctcacaaaggcagcagcagtcaggggtggcgactccctcatgatcctgtccctggcctcggaacccaccggaggagtaaccgcagcagtggtcacttccccaaagtgccatcagctctcctacatccttctcgagcctctgctttctctcccttccacccccacccctttgacaagcaacatctgaaagtctcccctgcccgcggctcccagagctgtctggccgtggcctgcactctccctcaaagcggccctcccccaggtcaccgtcctcccttcgatgacatcacgcgcccaccccgcactcctgctgggctgaggccctccgagcctacttcaccgggtcctcttctttctctcaaaggcaatggggtttgcctgtggtccagctgggttggccctcttccctctgtcctgggtccttgagtggccccgcttctttaggccatctatgagtcacttctctaatgcccctgtctccagaccagcttcagtcaaaggctgggccagagaagaccctagtgagaaacttctgatgagcagtgtgaccttgccacctcaggggtacccacccaccacccctggtctaagcacaggtgacaccgcctgtctcccccaaccacacacaccccttgaggctcctcctccaagcctgggtggggacactgtccctccctcacccagcaagctcaatctggcttgggccggaactgcttttcttcctaaagctggacggatggccgcgggcttagcttaacgggatgagccatctggggactgcagtgtccacgatcagatcagggagcttgaagctgaggggggcacactttacctcccaggccaggacaatgaccacttccttccccaccccacccccaggctactcttagccctagaaaattctaaacaagctgctcagctggcggcggagaggcagcccaacaagctggctcttgctagggaggcctggggggtcctggggagaggaacacggggtgggtggggggcgggcagccaggacctcaggcctgaggcctttggggaagggtctgtgcacctgccaggcaccagggggcagccttgccttgttcccgctccagtcccctcaagtccgaagcccctacccactctcacgccaggcaggggtgggggccgccggggtcatttacccgggccccttctctgccttgatgacaaagtcgaggcttgctcatcagccaggcaggctcccctctgcccactgtggagacacagaggcctgtcacctgaagagctggtcccggcctccagcttccagggtagccgggaagctgtagcccccagtgggcagcggtggagagagctcaaggaaggagggagcaccgggaggagacggctgcagcctgccaggagcggggagaaagggagagaaggggaggcggagggctgagggggcccgggggacgtcttcccagggctgggaggggccggccgggaagcctgggctgcactaggagccggcgaccctggggcgaggggcggcccggagccctgcgggaggagctggcggccgccccaggtagcaaccatcctgcctcccgctggagcggcgtctcctccccgggaggagggcagggaggaggtgggcggagtgtgacgaggagggcgggagggagggatgcgggagggggagggggaggggggccggccggccgtgggggtggggcgatagtgacatcaccccggagtcggtttttaagcggcggccggccggggacggggaagagagggatagtcggagcgaggtggcgagtcgctgagcccgccgcggccccgagagcggctgcagccgccgccgccgggaaggagagggcgaggcgcgcccgagccgccgccgccgccgccaccgccgccgccgccaccaccgccaccggagtcgcgggccagccgggcagcctccgcgggccccggccggggcggggggcgcgggcc

SEQ ID NO: 44737 - DNA, 2300 bp, Homo sapien
acaagagtcaccaaatcagcaacaacgtgacccagtggtgcaagtcttccgaatcccacgctaccatcccagcaccccgtggaccaagagtgggtgggagggcatcatttccagaactgtaacatagatcttcctgcctctcgggggcattctgaagaccagaaggcaggggacacaggaaaaggaactgagcaagtcatgacgaagcagaaccctgggaagggttggcaataacaaacacaacccctgccacccccaccccagacaggttctacctgttccatcgggtcccaattccagggtccaccagctgcacacaccagtcccagggctagggcacaggcaccctcctgcctaactcgcctgcttgctccataggccataccttttaggagaaatgaagggaatgcagagaagcaacacaacaaagacctccgcatagaggaaggtggcaactgcagtccactgcagactcatcctgttgctagaaggtttcccacaggaagatgtgagcttgtttcctggcagggcacaaaaggtacgggacttgtaagcgctgggcagccaagaacatccagttcagttaccctgcgaggctggggccgccactctccaccctgaccccctgcactttgcttcaaagtctctgatgcgctggcggaagcagggctccactcggcagggcctcttggccagcagcgttcacaggccccacaaacttccgttcgctggtcaattacctgccccctccagcacgtgtgtcaacacgtccagagcggcctctcccgacgatccctgccccaggaagcccgagatttccgacgcccgtttaactgaaaggcgttcttcgggaagagcagtgccagggcaccaagaggaggacgcctcggcacccatcgggcgctcccttccccgccaggcagaactcagccgcagaggcgggcgctctgcgggcccaaatccccgctaccaggcaggcccaaggccgcacctagtccaagcgctgccgacgcccccgcctcccaccgtccccacggcgcccgcggagagaaaccggcacctccctcgaggatccagcggccttccgcccggggccgcttcgcctccggtgggctggaggcccgcaagagcgactcctagagggcaggattcgggaccaagcgcaaaggcaggtctcgaccaagcacctcaaggccccatacggagaaagttctagacgcagtatcctcagaagccaggggtccttacagtagccctcgcgggccccagcgcccacccagagcgaggggcctccgacttggccccggcctggcacaccgtcccggaggcccatcccggccgctcctccaggtggggcttcaccgccccccgccccgcccccgagaccagcttctagaggcgccgcccggtttcccctcgcccctgcctctcacacgcaggtaggctgcgggccccgagattccccggcccccgggcctccccgcgccgctcgcctctctccctcgtcgatgggccggggagcctccgcggtcccggagcccagcccggcgcgcggagcccgctcaccgagtttcccacagtcaacgtgcaggccccgccgcagcaacagaactctcccacagcagccccggccccgcccctcataccgcggccggaaaccggaagcgcccgccgggcaccgcccaccagccctcgcgaggccccggaggctccgcccacctccgcttcccaccccgccccggagcggagggccggcgctccgagcgggagaggaagaggcgcctcgggctccgggcgagcagggcggggtggagcgagcacgcgggcggggcggggcggggctttgtcgggccggcgagggccgcttctctagtccgcgcggccgtcccacgtctctgtggtgcgggaggggccccgccgaggggcgagaacgggaggtgggggtgtgggcgggccccgccgaggggcgagaacagggtggggctcccgcgcccggactccgcccctcgcccctcctccgcctcctccccttcccccgactcgcccctggggaagagtgggtggggattctgggccggtggaggagtcactgtcgcttcagccaggctgcggagcggacggacgcgcctggtgccccggggaggggcgccaccgggggaggaggaggaggagaaggtggagaggaagagacgccccctctgcccgagacctctcaaggccctgacctcaggggccagggcactgacaggacaggagagccaagttcctccacttgggctgcccgaagaggccgcgaccct

SEQ ID NO: 44738 - DNA, 2300 bp, Homo sapien
ccgtgcccggcaccccaacctgccccacctcatggcccccatagaaggcgatctcctccgagttggccaccacacgcgagtgcatgtagcgcagctcccccttccgccgcgcctcctctgccaccagctccccgaacttgggcgagaaggcccgcagcacgttggccgtgaggaacaccacgaggccggcgatggccgagggccaggctgtgccggctccacgggagcgggccgcccgaagcagggtgtaggaagtcacagccacgtccaggagtggcttggtcaggttggagtagaggtgggccacagaggccgcaaaggccaccacgtcctccgtcagagactggtcagggttgcgaagccgcccgtccatgttgctgacccggtagtaggtctgctgggagaagtagaggcggtaggcgtgggccaccagacggctgcggaacgacagggccagttggccctccaggtaacggatggcactgttgacgaaggtagcagggagggcgatgaggagccactgcagcagctgccagccaaaagcccgcgggtccttgcggacgatgcagcgggccagccttccgtccaggcgggccacatacaccgacaggaaggtgcggctcaccaaggcggccgagtgcagggccagcagccccgtctcccggcacaggacccgggggaacagcagccgcaggagccacaggagccgctgcaggaatacccggttcatgccagctttggccgccgcgaccccggaggcctcctgcgtgggctccccggcgggcgcctgaagacccctggccggggccaggcactggcgcaccaaggggtagactttgtgggctccataggccgcgagggccaggagcacggccgtgcgcttcagcgtgttcccccgccagggccggggcctggagagcaccggcatgtcacctgggctggctgccgcgtagggactggggctggtgcctggggcagcagttgaggcaggtggctggaaggattgttgctctgaccctgggcctgttgtctaggcaactggaaaccttgcgatggcccctgagactgtcgctttaggcccccggggtggtgctggggcccctggtgcggtgggctcagggccctccagggtcgcggcctcttcgggcagcccaagtggaggaacttggctctcctgtcctgtcagtgccctggcccctgaggtcagggccttgagaggtctcgggcagagggggcgtctcttcctctccaccttctcctcctcctcctcccccggtggcgcccctccccggggcaccaggcgcgtccgtccgctccgcagcctggctgaagcgacagtgactcctccaccggcccagaatccccacccactcttccccaggggcgagtcgggggaaggggaggaggcggaggaggggcgaggggcggagtccgggcgcgggagccccaccctgttctcgcccctcggcggggcccgcccacacccccacctcccgttctcgcccctcggcggggcccctcccgcaccacagagacgtgggacggccgcgcggactagagaagcggccctcgccggcccgacaaagccccgccccgccccgcccgcgtgctcgctccaccccgccctgctcgcccggagcccgaggcgcctcttcctctcccgctcggagcgccggccctccgctccggggcggggtgggaagcggaggtgggcggagcctccggggcctcgcgagggctggtgggcggtgcccggcgggcgcttccggtttccggccgcggtatgaggggcggggccggggctgctgtgggagagttctgttgctgcggcggggcctgcacgttgactgtgggaaactcggtgagcgggctccgcgcgccgggctgggctccgggaccgcggaggctccccggcccatcgacgagggagagaggcgagcggcgcggggaggcccgggggccggggaatctcggggcccgcagcctacctgcgtgtgagaggcaggggcgaggggaaaccgggcggcgcctctagaagctggtctcgggggcggggcggggggcggtgaagccccacctggaggagcggccgggatgggcctccgggacggtgtgccaggccggggccaagtcggaggcccctcgctctgggtgggcgctggggcccgcgagggctactgtaaggacccctggcttctgaggatactgcgtctagaactttctccgtatggggccttgaggtgcttggtcgagacctgcctttgcgcttggtcccgaatcctgccctctaggagtcgctc

SEQ ID NO: 44739 - DNA, 2300 bp, Homo sapien
gtggcggcctgggcccggcatctctggtctgggggcccgggaaggcagctgagccagttggtagccaggcaggcctgtgggctcaggcgggggtggccttgaccccaagtcccactgctgtgctgggcgctgctcattaacctccgcttgggctgagtcatgcccataatgccggcctgcctggccagccagctctgctggacgccggccttcaaagggcccaagggcccaggaggggctaggcagcaggctgcgtccctcggtccccgctcatgaatggcaggcgtctcctcctggctggctgcaggagtggggcgggcaggagctctcgaggctcaaaccgctaggatcgcagctctaaggccaggacaacctccttgaggaggagaggaagcagaagtggcctcgagcgtgcaggcaaccagcacaggacagtccccacccagccttcctgcctctccactgccgcgcctgagtccacggctgcccaaaggccctgcccaccccagcccggctctcccatggcctgcccacacctttggcatcagccccggcccgccccagactgtccccaccgctcacggctgcctgcccccgggcctccctgccacacgcttccctccgtgcccggcaccccaacctgccccacctcatggcccccatagaaggcgatctcctccgagttggccaccacacgcgagtgcatgtagcgcagctcccccttccgccgcgcctcctctgccaccagctccccgaacttgggcgagaaggcccgcagcacgttggccgtgaggaacaccacgaggccggcgatggccgagggccaggctgtgccggctccacgggagcgggccgcccgaagcagggtgtaggaagtcacagccacgtccaggagtggcttggtcaggttggagtagaggtgggccacagaggccgcaaaggccaccacgtcctccgtcagagactggtcagggttgcgaagccgcccgtccatgttgctgacccggtagtaggtctgctgggagaagtagaggcggtaggcgtgggccaccagacggctgcggaacgacagggccagttggccctccaggtaacggatggcactgttgacgaaggtagcagggagggcgatgaggagccactgcagcagctgccagccaaaagcccgcgggtccttgcggacgatgcagcgggccagccttccgtccaggcgggccacatacaccgacaggaaggtgcggctcaccaaggcggccgagtgcagggccagcagccccgtctcccggcacaggacccgggggaacagcagccgcaggagccacaggagccgctgcaggaatacccggttcatgccagctttggccgccgcgaccccggaggcctcctgcgtgggctccccggcgggcgcctgaagacccctggccggggccaggcactggcgcaccaaggggtagactttgtgggctccataggccgcgagggccaggagcacggccgtgcgcttcagcgtgttcccccgccagggccggggcctggagagcaccggcatgtcacctgggctggctgccgcgtagggactggggctggtgcctggggcagcagttgaggcaggtggctggaaggattgttgctctgaccctgggcctgttgtctaggcaactggaaaccttgcgatggcccctgagactgtcgctttaggcccccggggtggtgctggggcccctggtgcggtgggctcagggccctccagggtcgcggcctcttcgggcagcccaagtggaggaacttggctctcctgtcctgtcagtgccctggcccctgaggtcagggccttgagaggtctcgggcagagggggcgtctcttcctctccaccttctcctcctcctcctcccccggtggcgcccctccccggggcaccaggcgcgtccgtccgctccgcagcctggctgaagcgacagtgactcctccaccggcccagaatccccacccactcttccccaggggcgagtcgggggaaggggaggaggcggaggaggggcgaggggcggagtccgggcgcgggagccccaccctgttctcgcccctcggcggggcccgcccacacccccacctcccgttctcgcccctcggcggggcccctcccgcaccacagagacgtgggacggccgcgcggactagagaagcggccctcgccggcccgacaaagccccgccccgccccgcccgcgtgctcgctccaccccgccctgctcgcccggagcccgaggcgcctcttcctctcccgctcggagcgccggccc

SEQ ID NO: 44740 - DNA, 2300 bp, Homo sapien
tggcgtttcaaagccaaacagctctgggcgttggatgacaaagttcagatgtgccccaggaggggcgacatcagtggtgcaggacagagggccggtggaaggagctggctgtacgtagaaacaaaaccagatgcctactggtgcatttaaaaatcaacgttattgagacgtaattaacatactatacaattcttccttttccatgtacagtttaaattcattcacagagttgtgcagccatcatcactaactccagaatgttttatttttattttatcccccaaagaaaccccagacccatgaacagtcactcctcattccctctctccagcccctggcacccactcatctgcttcctgtctctgtggatttgcctatctggacatgtcctagaaatggaatcatgtgctctgtggcattttgtgactagcttccttcactgagcatcatggtttcaagattcgtccatgtcataagatgaatcagtccttcattccttttcatggctgaataatattccattgtgtgcatagaccacaatttctttatccattcatcccttgatggacattttgggtttcttcatgttttggctattgtgaataacactgctgtgaacatccatggacaagtctctatgtgtgcagatattttcgtttctcctgggtgtgtagctaggagtagaattgccaggtcacatggtaactggacgtttcactttttgaggagctgcgagactgttctccacagtggctgccccattttaccttcccgccagcagtgttggagggttccaccttttcatcgtggctagcactggttatcatctcctttgtattctagccacctagtgggtgtgaggcagtatctcttggtggttttgatttgcatttccctgatgactaatgacgctgagcctcttttgatgtgttgagtggccatttgtatgtcttctttggagaaatgtctgttcacgtccttcgcccatgtgtgatcgggttatctctgtcgctgagttgtaaaagctctttgtatattctggatactgcaccctcatcagatgtgtggttcaccagtccagagttttctcccagtctgtaggttgtctttttcactgtctcgatattgtcctttggtgcacaaaagtgttgagttgaatgaggttcagttgatctgtttttctcttgttgctcatgcttttggtgtcctagtgaaggaactattgccatatccaaggtcgtgaagttttatcccattttcttctgagagtttcatactttgggccacactacacatcagcctgtgatgtgctctgggttggtttgtctgtatggtgtgaggggtccctctcctgcacatagagagaaagagagagagagctggttgccccggcaccatttgcagaagagcctcgcctttctctccagcggctcatttttgactttccgctgtctctgccctgcccctccccgccccgccacccacccctctggggctttgcagatgcagaggccgtgaagaaggcagccttggaaaagaaggaggaggagctggtgagcgagcgcacagaagccttcactattgcccgcaacctcctgacagcggctgcagatgccattgagcggatcatgtcgtcgtacaaggaggtacccctggcccagccccacccttgccatccttgccatgcttctctccctgcaactggcaggggctgagccagggtcaccctccctcaggtgacggagctggctggctacacagcccgggtgcacgagatgttccaggtatttgaagatgttcagcgctgtcacttcaagaggcccagggagctagaggacgctcaggcggggtctgggaccataggccggtctggtgtccgtgtggagggccccctgaagatccgaggtaaggctgtcccctccctatgagtgaccccgcccctgctgctgctgcaggtgctgacctgctgccccagctcctcctattcccgctccctcactcagggacctccatgtgcttctggcccatcccagtccacccaggacgggagggctgccgggcagggtctttgaggacttcggcctggtcgagctgggcccctggagggtttcctgcagagaggtgctggtccgcccgccttccttcccagacagtagctgccggccaccgtactgactcgccctttgagggcctcagcctggattattcattcaaaacaagggggatgtggtcccctcacccatgcaggacagcaagagaaagttccagtcagtgtgccagctgctggctgccacgggagg

SEQ ID NO: 44741 - DNA, 2300 bp, Homo sapien
gggacccggccattgcaggataaatccagcacgactcccctgacataagatgttccggttccccaaaccagcctagatcctttctggttacaccagcttcagaccaggggctgccatagccacgcctcttatctgctcagaaagcgtagaaggtgcatatgcaggccatatacacacatatttatgaaaatggtgctgcctgtggatggatttattttcttttttctttctttcttttcttttttttttaaagacagagtcttgcactgtcacccaggctagagtgcaatggcaccatcacggctcactgcaggcaccaactcccaggctcaggcgatcctcccacttcagcctcccaagtagctgggactacaggctcgcaccaccatgcctggctaatttttaaatttttttatagagatgggggtctcactatgttgcccatgctggtctagaactcctgggcccaagtgatcctgctgccttaggctcccaaagtgctgggattacaggcgggagccacgacgcccagcctgatttattttcttctgtggaaaggaaggagaaacccattccccatgccagattgcaggcgtctgtctcatccggggccagcaaggacatgtgtgtgtgtgttggggtaggcatggggggaaggacagggagagggagagaggccagctggctcccccaagcctcccctcctggagcttctaaatccctccctggctccttcaaggctgcctggccttcctgttggggagagacccctcgccggctgctcactcgctttttggtggtccttcccacgggcctgcctggtctgcctccacatcctcagcggctgcaggtgagaagctgtggatctggggcccagtggtccagagcgtggcccgtgccagaatgcccaggttcaaatcccatctctgtggaatgcactctgaagaaacgacgtcaggtcatggccctgggcaagttacccacctctgtgccccatttctctccatgcaggttggaaagaatgacacagctgctcagggaagcacccataccccgagtctgctgggcctttgagctccagggccaacacctggccctataccctggccgcccccagggctccagccacctgagccaagcttctcacccccaggcctccccagccccatcaccatttcctcctccctcatgggcccctcagtcttaccgtcctcccacttccgccagcccctctgtggatggccctgccacagggggaacagtgccccagcagaaaagccccagggtcgcctggattctcctgccttcgcctcctgccctgggtccaacgcacagtcttcagaatgctgcctccccagagcgcctctagaacgcgcccgcctctctccatgcccatgaccaccactggaccaggcctccccacattctctgccccagtgccaccagcttgcagttgcccatggcgagacaagttcaagttctcaagcctggccacaaagaccccacctgatttgctgacctccgccacaccctgggagacggcccttgaccaaccttgtgttccagtcggtgggaaacactggtttttcctcaacgccacgtgggcatgtcacgtccaggcctggcctggggtaggcctcagctccatctcctgcccaacgcctgccaaggttcatggttcaaggtcatgtagcctgacggttaagtgaaggggccctgtgattgactcagccttgccacatactagctgtgtgactttattcaagtttcctaacctcctgtgcctcagtttcccaacctgtgtttgtttctggatggtgccagtgccaagcccaagcctggcatccagtaggtgcttcgtgccaggttatggaatgcccacccaataggagggcgctgccgtctctcacctgccaggtgcccacggtcagtactccatcatgcccgctgcggccagcagagggcagcaacatcctgccctgtgccattgggcaaaggggcgggcggagagaggctgggctgcctggccgggcttgttgggatgagtcggactgggcacgattgcattgtggggagggaggctggggctctgtgagacgtgctcctggcaccgccagctgctacttggccctcgccggtggcccaccaggtaggcaagagctggggcaggcttgggcttgggcttggggtgcaggggctaccagcctcagggcaaggcatcagggtctcagggccaactggctggggtcaggcaagagcgctcgggtgtcggcccagcctgacgacggcactaggtgtct

SEQ ID NO: 44742 - DNA, 2300 bp, Homo sapien
ggaccctgtgggccagaagctgcagctggcctgccgcctgcagcaggtcgccgccctggtggaaaacaaagtgactgacctgtgagctctggctcagacagcagcaagccggatccaccaacaccgcagcgccttatgaccccggaaccgagccagccactgaggggagctggcagagcctgggggcacagggtgcaaagccaggcactgtgcccagcagtgggctccctgcctgccacctcccctgccagcccacccaccttccccccacctgagattgtttctaatttataaggatccccctccttccccctctccccattgtatttatttgcctgctggaaaatcacatccggaaataaaatagaaatatgtctttttattttattttgagacggagtctcgctctctctcccaggctggagtgcagtggcgcaatctcggctcactgcaacctctttttcccggagttcaagcaattctcctgcctcagcctcccgagtagctgggactacaggcgtgtgccaccacacccgactaattttggtatttttagtaaagacagggtttccccatgtcggacaggctggtctcaaaactcctgacttcaggtgatctgcccgcctcagcctcccaaagtgctgggatcacaggcatgagccaccgcgcctggccagaaatgtcttttgacaaagggcccaatccccagcccctgctgttccctgcaggagctgactcagtgctctcctgactgagagtccctcagccccatgcctataacctgctacccacagacaaagagaggccatcaggtacccgggcttcactttccctcccactctctgacctcgctggcccctccagcaatgcctggcccacccctaccagttcacggaccctggtacagggacactgcaccaatatcttgggacaaacaccctctctgccgagccccctccctttcattgggactcctctgtcaggccccagctggcctcccggctccaccctcgcctctccattcccttgtccttgaagtggccagagtgatcttttgctgagcagaagctcagtgaccaccccccaaccccatatcacccaagctccacattaagcctacagacaccaggcctctagtcctcgccctcgaaccatgcggcagccgtggccagcacgtgaagggctggaacgcgtcttggccgcaggccttgccccactgtgccctgtgctgccctggatgcttctggggacccaatttctcctggtctctcatgatgcagcccctgggtcacaggcccctcagtcaccaccgcactcatggggaagtggctatgggcttgcttgtccccagcagtgagcagcttcctgctgcctccctcatgtctggctatggagcagcccacgacaggcaccttgcaaatggtggagaggaagagcaggcgctgggagccagagcgccaggcagcgtcgcaggagcaggttctgggctggcaagctcccaggcctcccctcagcaggcctgttgcctctggtaggggaaatgaggggtccccagtgacgccacattcagagggcactggactcccagttgtcctaggggctgatgaaacatagaagaagcaggaagtggctgggagcagccagggacagggttcccatgggaatgagaagggcacctccaggaggatgcccacaggggcacaggtggtgggggcttggcctaaggaccaggttgccaagtggagcacatccccacagtccgcaccggagaacgggagcccgacctggggtacgggctgcttcacccccgcgtggacctccccctcagctggggtgcggaggctcagcctgggggcccagttgcccctggtccccaagcagcagccccctctgcctccagggtgggcctggagcaggaggggggcctctgcccgggggccgggctctctggggccgccgtcgcgccgccccctccccgcaccgcataccttgcccacagccgagcagctgggaggctatttataaaggcgggtgagatcagcggccggccaaggctataaattcgcaggccgcggccgggccccacaggagcagccgcccggggcaccggagctgcgggctgcgtggccgggatgagcgccagcacgggcggtggtggggacagcggcggcagcggcggcagtagcagcaggtagggctcggctggggcacccggagcccctggcgtctctcatgcccactgccactcaccccacccgcagctcacaggcctcctgcgggcccgagtcctcgggctccga

SEQ ID NO: 44743 - DNA, 2300 bp, Homo sapien
tcttccctggcggctgtgcagggaaacctccacttcatgctgactggggcgggcgacaggaaccctggggtgaccctggctctgacagcagaccggtaagctgtccaaaaacaagaggaagaagatgaggcgcaaacggaaacagcagaagcggctgctggaggagcggctgcgggacctgcagaggctggaggccatggaggctgccacccaggctgagggtgaggggccacagagggtgatgggccgtggagcgcagcaaaggctgcaagacatctgctcagcagctgcctccaccccgtctccccagactctggcttgagactagacgggggcagcggctccacatcctcttcaggctgtcaccccgggggcgccagagcaggtccctccccagcctcttcctcccccgccccagggggcggccgtagcctcagcgcgggctcacagacctcaggcttctccggctccctcttctctcctgcctcctgctccatcctctccggctcgtccaatcagcgagagaccgggggcctcctgtcgcctagcagtaagttgggtggcaagtggtgggcaggcagggctggcagtagtcggaccacttcagtctccctgctctgccttccccagcaccattcggtgcctcgaacctcctggtgaaccccctggagccccaaaatgcagataagatcaagatcaagatcgcagacctgggcaacgcctgctgggtggtatgagcaagtgtgggagagcagagtggggggccctgctccaagggtggaggcacagggccgctcttggggagccctaccccagtctgcagtgcacgtgaaccgtcggctgggtgggcactggtcctgcccagtcaacagcactggggccatggccaagggcaggggccactaggaagggatcagcctcagcctcacatcactgggcctgtccctcttggaggacctggggaccccgaggctcacagcaaaccccactgagctcctcgggtaggcggatcggggtggggcaggagtccgtgggggcaggacagccttggccccagcccgtccccagggctccccttgcttccagcacaagcacttcacggaagacatccagactcggcagtaccgggccgtcgaggtgctgatcggcgccgaatacggccccccggcagacatctggagcacagcctgcatggtacgcccgcccgggctgccctgtgcccagggccagcagcccaccagccagcagcctcacctcctcccccttccaggccttcgagctggccactggtgactacctgttcgagccgcattctggagaagactacagtcgtgatgagggtaaggggtgagggctctgggctcagcctcccggcctcccggcctgcctgcccccaacctcctctttctgcccacagaccacatcgctcacatagtggagcttctgggggacatccccccagccttcgccctctcaggccgctattcccgggagttcttcaaccggagaggtgagggcccgggcagcctcaggccatgtggctgcagggagggtgggacggggaccttggattctgcaacagagggaacactgggtcccaggagccagggcctaagcagaaggcaggtccagagacagggacagagcctgacgcccgctggcctgcccgcaggagagctgcggcacatccacaatctcaagcactggggcctgtacgaggtactcatggaaaagtacgagtggcccctagagcaggccacacagttcagcgcctttctgctgcccatgatggagtacatccccgaaaagcgggccagtgccgctgactgcctccagcacccctggctcaacccctaggcccggctgtggctccacctccagctctccgtgccttaagggaaaagcgggacagctcccaccaccctgctgggcgccagttctccacaaccacagggcagagagacgctggagccaggcccggctctcagagcgtgttctgcctgagacccccgtgagggctctcggagaaagtgtgtgtattcctttcttaataaagtgtggactgaacatcggtgcctggagtgagggaggcccacgccaagtctagggagaaggtgctttattctgggatctgcgtaccaggctggctggggtgctggagtgggaaggggaatccaaggagcaaaccaagaaggtcctagggccagcctaggcctccacggcccggccgttgatgacgcggatgtggcggatgacgtcctggatggcttcagatgttgtgccctggcccccgatgtccg

SEQ ID NO: 44744 - DNA, 2300 bp, Homo sapien
cgaaaacaaatgtgtagggacatccagccatttctggaaggttgataacagaaacccaactctaggaaggccttcggaaaggactgctggatgccgaatgtccccaacgccctgactggaaatgccggacagcttcagagccaaagctgcctgagccaaatgtgccaggtgccaagtgacctgctgtcctggaagaagccccacctagaacacacctgagacggtggcagagccaaggtcttccctgtcacttggggatgccctgccacttgaccaccaggcagcagcaaagtgttccagccaatggcagaagcatcatagccattggccaaagagccatgccttccagctagaagtccagaaaggctcgggcggagtctgacctctccctgtctgtgtgtccctggccggcactcatcagtccaagccaggggctaggagagggtgcccacaaggaccagagccccgaggatagctcagctgatctgtgtggcacctggatctgcaagcacaggcacggtcgggacttttctgtcttctctctagcgcttatcaacgggtcgggacttttctgtcttctctctagcgcttatcaacatctgaaatcatcttatttgggggctcttgtaagcacgcagaaagcggcttcgatggaccttcctccagggagctttccctgatgccctaaggctactgagctgggaccctaaggccctacttacccccttccctaggttatcactgcattgctccctcctcaacccctgagcccgagaggaggggccaagtcagtgtggtccaatactgtcaccctaggacccagcacagtacctggcccagagctggcacataaggaacatttcctgagtgaacaagcacatcagaaaatgaaaaaagatctggagactagggaggcctcggtccaaatccaccatccactcttcttgagatggcttcatggcctcatctgaaattcacagaacggaggtacctactttccgtgactgttggaaagattaggggacaggaggtgtgtgagctgctcacagtagctagtgccacacagcacgcctgccccttcaccccactggcccctcaggtcagagttcaaggctggtgtccctgggaggtcacgggtggacccctgcagctcccagcagtagttcctcctgggcttcagctgtggcagcaagccaatctcctgagagcatggacctccctcacagatggcaacatcaccaccagggctgagctgaacctctctgccacccggtccctgtgccaggtgttcctttgggctttggcaaaagacccagagagcgctccagatggacttccctgaccttactgtacagatgcaggcaccttccttcaggaggtcgcaaaggctctgccttgtgccctgacttccctgtgaagccaccaatcaaaggagccaagtgtgaggcaggatgcaatatgtacacgcctcccgctctcccatcaccctttcatggttccatggaaagaaagaacatccacaccccacatcttatgcctgctgaggcttctgtctttggcatatttctgttggaccatgtgtcaatggtggctgcatgttttcctatggcgtccaaatcagtgggattcaagacctggggttcctctgtaagggttctcacacccaggacggtcagtctcagggcaaggcactgcccagctacccaccgttcactgtcccctactcccaccccaacgcacacacaggcacacacacaggggaggtcagggaggaggcacacatgtcttcaccaagagcctacaggagcccagttgctggagccatcagagcctctggaaagccactatatactgccgtcctttcagcagcaaggtgggagaagtcagcatcgtcaagagaatttcattaggcacaagcagtctcccccagaggtcagaaggagaaaacatggcaagtagagatgtccctggggagtggccgcaaagtcacggagttctggaaggtcagagttgacaggatcctttgagaacatgaagtctcctcccctctgggttccaaaggggaaactagaacccagagagaggaggaaatggcctaaggccacgcagtggctcagtgtgggagcatggcctagaggtcaaacctcttacccatcagggccaggtgctggctggcagctgcttcagatggtttccagcccacctaggacctaaattaacctcttcttaaataagtgtaaggaaagaagactcggacctgaatacgcaagaccgcacacggagaagagcagaagcaaaac

SEQ ID NO: 44745 - DNA, 2300 bp, Homo sapien
atccactcttcttgagatggcttcatggcctcatctgaaattcacagaacggaggtacctactttccgtgactgttggaaagattaggggacaggaggtgtgtgagctgctcacagtagctagtgccacacagcacgcctgccccttcaccccactggcccctcaggtcagagttcaaggctggtgtccctgggaggtcacgggtggacccctgcagctcccagcagtagttcctcctgggcttcagctgtggcagcaagccaatctcctgagagcatggacctccctcacagatggcaacatcaccaccagggctgagctgaacctctctgccacccggtccctgtgccaggtgttcctttgggctttggcaaaagacccagagagcgctccagatggacttccctgaccttactgtacagatgcaggcaccttccttcaggaggtcgcaaaggctctgccttgtgccctgacttccctgtgaagccaccaatcaaaggagccaagtgtgaggcaggatgcaatatgtacacgcctcccgctctcccatcaccctttcatggttccatggaaagaaagaacatccacaccccacatcttatgcctgctgaggcttctgtctttggcatatttctgttggaccatgtgtcaatggtggctgcatgttttcctatggcgtccaaatcagtgggattcaagacctggggttcctctgtaagggttctcacacccaggacggtcagtctcagggcaaggcactgcccagctacccaccgttcactgtcccctactcccaccccaacgcacacacaggcacacacacaggggaggtcagggaggaggcacacatgtcttcaccaagagcctacaggagcccagttgctggagccatcagagcctctggaaagccactatatactgccgtcctttcagcagcaaggtgggagaagtcagcatcgtcaagagaatttcattaggcacaagcagtctcccccagaggtcagaaggagaaaacatggcaagtagagatgtccctggggagtggccgcaaagtcacggagttctggaaggtcagagttgacaggatcctttgagaacatgaagtctcctcccctctgggttccaaaggggaaactagaacccagagagaggaggaaatggcctaaggccacgcagtggctcagtgtgggagcatggcctagaggtcaaacctcttacccatcagggccaggtgctggctggcagctgcttcagatggtttccagcccacctaggacctaaattaacctcttcttaaataagtgtaaggaaagaagactcggacctgaatacgcaagaccgcacacggagaagagcagaagcaaaacccccgcagcctcagaaaccctagctccttcccattccaggcgcctcgaggggaaggcatctggggctctaagactgggggactatgggggatgactggcaaagtccggttctttgccaccgggataggtggcaaagcggtccacgagagaggaaaccgtggagaaatttgagtcccggaaccggattcccgaagcggtttgagaaaggcgggccgggatacgtgagtgactgcctcagaagggctccttcaaggacactaaggaggtgacagccgccgtggcccactctcccggcccgtccggagggccccccgccacccgatgcagaccccctgggggagccggtccagggccaacttcggccaatcccctcagtgacagcggaggcggccaatcaaccccggcgcgaagccctttccccgcccctggtggggcccctagccaatcggactccagactgcttcgggtgcggctaccccaccgctcccctgcgaccgctgccgcggtcccgtggctctttccctgctcacctcccagggacggcagagaagggctggcccgagcaccgccttcgcggcgctgccggcgacggtcgctaccttcagcgccatgacggaaagtgagagcctccgcacgtcccgacacgcagataccgctctcgcgagagttcgacggggtgcgaagtttcggggacaggcgcggacccggtactgcgcacgcgcgcggtcgcaccgattcacgcccccttccggcgcctagagcaccgctgccgccatgttgagggggggaccgcgaccagctgggcccctggctcagggaggggccacgtcagtgctgccagagacgtcacaatgccggcccagccgttcggtgcgcgattggctgccgctgccacttacgcgtcgctcttcctcgtttgcccctcgtgttcat

SEQ ID NO: 44746 - DNA, 2300 bp, Homo sapien
tcaactagcagtgaggagcaccccccacccgccctcctgtctgaaaccccactgtctcacctggaccctgttcttgcatgtcagggagatctccacaatgaagacggtctcagtggaaatgacagcgtcagaagtggtgtagtaggaaggggtgatctggggctccaggcaggcctcggctgcggggaagagggagagatgcctgggtaaggccagctcgagtatcccggtctgagggcaggatggcccggccctgcctcatagcacggatcagctggggacccatgcgctcttcctgccccttccaggtgggatatgcgagacagatccaagtgctcggtcacaaatgcaatggcaacgtaggcgggatggctgtgaaggaaggctggggaggggcaaggccggctttctggaggtgtgcaggaagagcgaactggggacaggtgggggctggattcactggacaatacatgccaacacttggacctatgacacggaggcccgggggccacgccagcctcaattcagagccacaaacggcctggacgagttactgaaggcatcctcagcagagacatcgggggtgggggctgcaggcaggcaatgcactggggctttcaagatgagagaaagggtctctgcccccggccagttgacagaaggtgaagactggccccagcgtttcctgaagaagtaaacgggagagactctggttccagaagcacaacttgttagctgtgagagaaaggaccttgccttagccttctccataaccagaggcccaaaggaaaggaaggctgccgcctacatcagagggtgtgaaacaaaggctccccaaagtgggaatgttctcagccacccgctgtccaaatgtggtgccctggcagaacgatggcttcagcagaggacgtcagagaaggctctgggtctggaccacaggaggcagatccctaggaacagcgtggaggcagttctcaggggctagatcccgccagcccttctgtgtcctgcctaagttgggcctgcttcctgtggcgcaggggagcccccgaagggttttatggccaggcttgtcctctggatacgtccctgactatagttcagggaattcctgaggggcagatgaggagtgtgcggaaagggaggccagttaggctgccaaaacgttgcaggcagcaaggctactggcctgaaggacggcagaaaagggaatgtggagaaagccgcccctgtccagtcctggcccccgggcccggggctggctgctgcagccacctcctaaacacactctggagttcagacctcagcccctcacgaatgcaaatcgacgggacccctggtcggctctgccgaaaactctggtaagggtaaggcagggccctccggaaaagccagtcttcggcctggcactcaaggccctgcgcacctttggctccccatctaactcgccccgctcttgctccctctcctcactgaggtcccttcctagcttatgtggctcctccagccccgtttttggccgcgatcgctcagcgctacagagcttcgctccggtccgaccccgcagggagcgggagccgggacatgtgtcacgttccgtgctgcagcttgggggccgggcgcaccatggaggctcggggactcctcttcgtatgggcagacaaggaaaagcctggctgccggtaaacgtgcgcgaggtgctttggtccccccgtcccaaggccgcctgcctctcgggggaaggcccggcccgcagcgacggaccctgaaaggccggacccccgcatccctcctgcccccaacaccacctgccgtgggtcagaggctcgcaagaaagaagccccggctgggccgctacctgagcagcgggagaggctggacagcaggagcagcgccagggcgccgagagatgccatcgccgccatcgcctcttctctgcctagaggaaaagaaaacgagctcccatgaacacgaggggcaaacgaggaagagcgacgcgtaagtggcagcggcagccaatcgcgcaccgaacggctgggccggcattgtgacgtctctggcagcactgacgtggcccctccctgagccaggggcccagctggtcgcggtccccccctcaacatggcggcagcggtgctctaggcgccggaagggggcgtgaatcggtgcgaccgcgcgcgtgcgcagtaccgggtccgcgcctgtccccgaaacttcgcaccccgtcgaactctcgcgagagcggtatctgcgtgtcgggacgtgcggaggctctcactttccgtcatggcgctgaaggt

SEQ ID NO: 44747 - DNA, 2300 bp, Homo sapien
aaaagcagagggctccgtgcaggcgcagccacctgcgcccatgcccagggcccttctgccctctcatctggcacaagctcccagcctgctccatccctaggcggactctgggtctcctcgccctgccctctctgtgctgactgggggctttgcttccaactgcaaaccagcctccctgggtcttttcttggccctgttccctttgcctgatggaggccaggtgtcccctgctccagaagccttccccgcctcccaccgaggcgtgcatggccagccgtgtgctcccttagctgtgggtaaggtctgtccccacgctcacctgcggggcatagccatttgggcataatgctagtgtgtagcctccccaggcccagaacagcccttccataagccgctgagcccatgaggagaccctgcacgcctgcctcgagctgcctcctcctagaagtgcttcctgctgacccttgctggccccatggcacgtgccctgaattctggtggagtctgttcagtccttcttggtccttagtcattcgtcccttctctacttgcctcccttccccaaggaggacttgaaggtcgcagcatactgtcccagggtgctgcggaagcagccttcgaccttgtgggcactgcttgccccaccacctgcgctgtgcgtaatgggcttccttctgctacccttcattgtccttccttcacccctacagcatcccgcagagctgcttaggtcctacttccgccttgggccctggcccgcgatggcctcctcctccctgacccctccttctggccaccgggcagcctgtcctggctcatgaccttgactcagtgccacaaccttgctgagcttgctgacatggtttcctcatctgcaataatggcatctccctcaaggttgttgggggttaggattttgtggagacccacatcaggggtctttcccagaatgtagcacatggcacgtgcccaaaaaacagtagtggcatttttttttctttgagacggagtctcgctctgtcgcccaagctggagtacagtggtgcgatctcggctcactgcaagctccgcctcctgggttcatgccattttcctgcctcagcctcccgaggagctgggactacaggcgcccaccaccacgcccggctaattttttgtatttttagtagagatggggtttcactgtgtttagccaggatggtctcgatctcctgacctcgtgatctgcccgcctaggcctcccaaagtgctgggattacaggcgtgagccaccgcacccggcctagtggtggctttataaggaccactttcttggcacctcttttaggctactttgcagttccagggggcttcttgtacatcaaggccttttctcttgggcaagtcagttgtcactgtgaggacacaacactgtatctttaggcatcttcctacttgtcccccaacctgaccctggccctccctagtgagtagacatttgttgagagactcggctcatctgaagagtcaaggtcatcctcttgcttgatgctgaatgagcacaacacagatgctcactgagtgttggctgttatggtccagtcattgccaaggaactcaatgggatcttcatgctagctctggcctcagtgccgccctagaaagaagtgggtccggatggggagaggccaggagagctcaagcagtgtctggaggacgttgtagggcggtatcacagcctccagacccagtgcacagaggctgggtcccccagtccttggtgtgacttggtgatccccagctggccttcagtgggatgaaggctgagcagtggggcttgcctgggaacaggggcaccaaaggtagccagggctgcagacagcagattccttgcttgagtggcttggggtgctggttgtcagcccaggtcctgccagctagggcctctgccttgacctcagaggggaggagcaagcctttgagggttcttacggaggcgtgtctctgccgcaggtgaacgggaaggagctctccaagctgtctcaggagcaaactctgcaggccctgcgctcctccaaggagcccctggtgatccaggtgctgagacgcagcccccgcctccggggggacagctcctgtcacgacctgcagctggtggacagtggcactcagaccgacatcaccttcgagcatatcatggcgctgggcaagctgcgtccgcccaccccgcccatggtcatcctggagccgtacgtcctctctgagctgtgagtcgccctcaggagggccccgggccctgcctccagagaggacaggccacc

SEQ ID NO: 44748 - DNA, 2300 bp, Homo sapien
ccatccaccagctgcagagaccgatgctgagccctcaatatgacgccattcctcaagactagccagccattgggtggcaggttgcaacctgcacaccagcccttgtctcaagttctgctttctgggagaagccctggataagaaactcgcctctcttctccacattctgggcaggcccgccattcttgatttctcttctaacgaggagccagggaggaaaggaagggctccgattcaacagccccgtgtggctgggggttccctcacttgcccaaacctggaaatgaagcatgtagcaatttctccaagtgatctcctgcagccggggcagcctctgggaacgcagacttccacccgctgctgctttccaggcaaaggccttctccctccaggcttgtccaagaagacggggaggtggtgggagagaagaggaagagatggaagggctgtgaaagcggggaccgggtgagggctggggctgaggaacaggtaggcggcgggcccaggctggccagtgctgtgtgcaggcccgggtcccaaggcctccgaggccactctccccacgacccaccccctccccacgcttcgctcatccttttttctttctctctttcttttctttcctccctttctctctttctttcttgttttaaacaaaggtgtccgtttcaaagacagcagggaatggctgagttgaaggagggatgcagtcatttaaggcgaagcccgaggaaggagcagaggcgtgagggctgctgcgtccaagaccggggagaggggctgaaatcgcggactctctctgggggacccaggagactgctcctcctggcaggacccctctctcccagagcggcatcgcgcagacaacgcgcctggtgcccgcccctcaggaccggacgccgggtgtcgtggggtgcctaggacccccgcccgcttccgtcgagcgcccgcccccggcttcccgcgccggctccagcgcccccgccgctccctcccgcagccggccccgctcccctccccgcccctcccggcgcgcgtgcgccccgtgcccgcgcccctcccccgccgccgtgggcgcgctcgcgtgcccgtcgtcccgggcgggagctggagacggccagcggctgctggacgaagagcgggcgccgggagctccgagagcgcggccgggcgaggcgggagcgcgggcgctggcctggccgcgggcgggggccgccgccgcgccgctgcccccctgtcgcgggccgggccgcggcgccgagcgcgagggccgggctcccggggctggcggccatgggcaggagccggaggcggcagcggcagcggcgggccccgcgggcggggaggcgcgcggcccacggcccctgacggcccctggcggcccggcgcgcccccgcgctccctggggggccgtagcctggcaacgcccggcgcgcccgcccatcccccgctgccctttttctcctggccgggtgcgagggagcatgcccgcgcctggcctcggccagcgaagagttaacctgaggggcgagccgctgcccccacctcgggggcgtgcccccctcccccgctaggcggcccgccccccgcgccagggtatggcccctggccccggcccgggacccgaggtcccgcgcccgggtcagtgaaaggcgtcttcccgttcccgccctccgcctcctctcgccggccagcaacatgggatgtaatatgtgcgtggtccagaaaccggaggagcagtacaaagtgatgctgcaggtagggccgccggcgctgcggcgggggcgcggccctccgcggggaggagcgggccagtggggaggcccggagcggcgggcgtgggagagcgggagggctcgaggaggacaaggtagggagccgtccgcaccctcccatcctggggctgttgggtgttggcgctccgtgggaaccagccacgggtggggtgggaagttggggttggcccgggtggggcgcgcttccgtcccgggaggcgcggtgcggcgggcgcgggatggaggttgcatagcaacgagcgcagttccccgcacacgctctccccgcaggacccagggcgggggagggagccaggctcccgccgtgcggggggcgccgaatctagatcccggcgggcctggagcgtgggagtgcgtgggcgtccccgggcgcggtccaagtccgtccgggggctgggtgcccaccccgacacccactcccgcctggccctgcccgaacgatgggctcccgggccttaggcgtctcgggtgagtgggcgccgccgggatcagcgggttgggctc

SEQ ID NO: 44749 - DNA, 2300 bp, Homo sapien
gaggtggagatggcacattgaggcccaggcagtccagacccccggtcacccggctctttcacactggtatgccccttcagctcacacctatggcctcatgggaggtggtgatggggtgtccccatgactgactcagacccaggtcctcgactggtcatctcatgtcaccactaggaaaaacacctgctgtcacactgaggccctttgcagggtggccctgagagacagcagtgaggggacatcctctaggggagcaagacactaggttgtctactttgtagagggagaaatggcctgagatgaaggtgtccatgacccccgggcagtggaaaatggctgggctgactggtcagggacccgggtggaggaagattggaagaagagacaggtttggcgaagaggtacctacgggagtgctcagggagagtgtggggccccgtgctcgtcttcgcgcccatgccgctggggagcatgcagtgtggagggggcgcgccagaagctagcgaacagaggggaccatctggtggaggtcagccagcttctccccaggatgcgatggacccacgatgccagtggccatggtgggagggctggaggctctgtataagcccaacggcaagggcttcctcttaccacggctcatctagacactgccgctagtgaatgttcttccatccaccagctgcagagaccgatgctgagccctcaatatgacgccattcctcaagactagccagccattgggtggcaggttgcaacctgcacaccagcccttgtctcaagttctgctttctgggagaagccctggataagaaactcgcctctcttctccacattctgggcaggcccgccattcttgatttctcttctaacgaggagccagggaggaaaggaagggctccgattcaacagccccgtgtggctgggggttccctcacttgcccaaacctggaaatgaagcatgtagcaatttctccaagtgatctcctgcagccggggcagcctctgggaacgcagacttccacccgctgctgctttccaggcaaaggccttctccctccaggcttgtccaagaagacggggaggtggtgggagagaagaggaagagatggaagggctgtgaaagcggggaccgggtgagggctggggctgaggaacaggtaggcggcgggcccaggctggccagtgctgtgtgcaggcccgggtcccaaggcctccgaggccactctccccacgacccaccccctccccacgcttcgctcatccttttttctttctctctttcttttctttcctccctttctctctttctttcttgttttaaacaaaggtgtccgtttcaaagacagcagggaatggctgagttgaaggagggatgcagtcatttaaggcgaagcccgaggaaggagcagaggcgtgagggctgctgcgtccaagaccggggagaggggctgaaatcgcggactctctctgggggacccaggagactgctcctcctggcaggacccctctctcccagagcggcatcgcgcagacaacgcgcctggtgcccgcccctcaggaccggacgccgggtgtcgtggggtgcctaggacccccgcccgcttccgtcgagcgcccgcccccggcttcccgcgccggctccagcgcccccgccgctccctcccgcagccggccccgctcccctccccgcccctcccggcgcgcgtgcgccccgtgcccgcgcccctcccccgccgccgtgggcgcgctcgcgtgcccgtcgtcccgggcgggagctggagacggccagcggctgctggacgaagagcgggcgccgggagctccgagagcgcggccgggcgaggcgggagcgcgggcgctggcctggccgcgggcgggggccgccgccgcgccgctgcccccctgtcgcgggccgggccgcggcgccgagcgcgagggccgggctcccggggctggcggccatgggcaggagccggaggcggcagcggcagcggcgggccccgcgggcggggaggcgcgcggcccacggcccctgacggcccctggcggcccggcgcgcccccgcgctccctggggggccgtagcctggcaacgcccggcgcgcccgcccatcccccgctgccctttttctcctggccgggtgcgagggagcatgcccgcgcctggcctcggccagcgaagagttaacctgaggggcgagccgctgcccccacctcgggggcgtgcccccctcccccgctaggcggcccgccccccgcgccagggtatggcccctggccccggcccgggacccgagg

SEQ ID NO: 44750 - DNA, 2300 bp, Homo sapien
ggggaggagggcaggggatgaggcgtggggtgcaggactcacctccctctggggtgctgaaggtgaactcgctggcgggccccgatcctcgcccgttaaaggcctgcacctccaggtggtaggagctatagggccgcaagccactgaggatgacactggtggtgttggcgggcaccaccacatggtctttgtggatatgtctcttgctgtgcttcctctgactgccctccctccagtacgtcacctgcacaagcgaacaggagacctcgcaggggcagaaggcacccagcagggcccccagcgcacacccccaccacccttaatggggaccctcctctcaacccaagtcttccaggagagcggctggcaggtggcaaagccccctcaccatcctgtcgctttacctcagtgatcaccctcctgggcccccatgccttcaacccttacattgtatccgcggaggtggcccttgacctgggccaggtccaccggccgccacttgaccagcacggcacttgagttgaggatttcaatgccttccagctcagggattgcctgggggtctggaaaccaccagtgacttggatagagccataggctctcaccccagccctgaggccaggcccaagcccctacacacagagaagacgaattcggatattttatgaggtacagtttgaggaggagaggtgtgtttgcatggtctcaagatctcttcctggactgcttattagttgcaaaggtgaaaatagtagcttatacaaaggagaaaccatggctgggcgtgatggttcacacccgtattcccaacactttgggagacagaggcgagtggaacatttgaggtctggagttcgagaccaacctgatcaacatggtgcaaccgcatctctactaaatacgaaaattagttgggtgtggtggcgcgtgcctgtaatcccagctaatcaggaggctgaggcaggagaatcgcttgaacccgggaggcagaggttgcagtgagccaagaccgctccactgcactccagcctggatgacagagcaagactccatctcaaaaaaaaaaaaaaagaaagaaaagaaaagaaaagaaaaaagaaaagaaaaaaaggagaaaccagaaaaaaaacttgaccgggtacttcaagttaccatctggtcatgttccagattcaaggaaatgaaagaagcagcattggctgatataactggaataccgctgccaattatagaaatgtgaagtgtggggaatttcataacgtcgctctggttatgtaagagaatatcctcatccttaggaaaggcgcacaccaatgctgagaggtgtggacatgggctggggtggaagcaggcgagctcaaccgtgggcgaggggccctgccggatactcacagtcctctccagagtagccgatagtgacctggggctctggtcccttgccctggctgttgacggcctggactttgatctcatagggcacgaaggtggacgtgttggacaccaccaggaaggggtcgctgacaatctgctcctgccagggccctcgtgtcccctgagggcgccactgcacgcggtactgaacctggggggcgttccagtccatccaccggagcggctggaggaggccagcagaagaggagttggttggccaagaacaccagcattctttggcccgccccccagcacaaaccagcatccccagacatcagccccttcctttgcatagccaagggggagcaacagacacccaggtcatggcctcatgtcccccaggcagctcagcccagggactctcaccttccacgtgatgaccatattggtggtctcatttccttcccccttcacatccacagggttcttctctggggctggaaaggaaagtattaacacatcaatgctgcagcctcttttggagagccacgaggaccgagggccaaggaacaaatggctcattctggcaccaagggagtccagccccctcgcgctccccctggaaatttggaagcagaggaacttgggcatggcacctctctaagccctcccttcacagcccggagccccttccaggtggcatgggagtgggtgccaccctgactcacctgcctcaggtgtgaccacagtctcagagaccgggctgggctccccggggccatatttgtttatggcagtaaccctaaaggtgtagtggacatagggcgacagcttgagggtggtagaggtctggttccctggaaccttgcccagactgtaccatttttcaggcgccatttccttgtcctcaaattcaatgtcatattctg

SEQ ID NO: 44751 - DNA, 2300 bp, Homo sapien
caccctcagggagccctgggccggtgccacggctggtgctgtccgacctgcacctgctgacgcagagccaggtgcgcgtgtcctggagtcctgcagaagaccacaatgcccccattgagagtaagaggcttgagctcagtgccaccccaccgtcacttctgccagccctggcccctcctggggtcctccctcctcctggagccttcctggggggacacggtttggggggactcacggttcctcatgggaatctggagatgccagttggcctgggtaatcagggacccagactgtacccaacccctccacagcccttcccccaaagccacatgctgatcactccattgtcggttcatttcttggcagaatatgacattgaatttgaggacaaggaaatggcgcctgaaaaatggtacagtctgggcaaggttccagggaaccagacctctaccaccctcaagctgtcgccctatgtccactacacctttagggttactgccataaacaaatatggccccggggagcccagcccggtctctgagactgtggtcacacctgaggcaggtgagtcagggtggcacccactcccatgccacctggaaggggctccgggctgtgaagggagggcttagagaggtgccatgcccaagttcctctgcttccaaatttccagggggagcgcgagggggctggactcccttggtgccagaatgagccatttgttccttggccctcggtcctcgtggctctccaaaagaggctgcagcattgatgtgttaatactttcctttccagccccagagaagaaccctgtggatgtgaagggggaaggaaatgagaccaccaatatggtcatcacgtggaaggtgagagtccctgggctgagctgcctgggggacatgaggccatgacctgggtgtctgttgctcccccttggctatgcaaaggaaggggctgatgtctggggatgctggtttgtgctggggggcgggccaaagaatgctggtgttcttggccaaccaactcctcttctgctggcctcctccagccgctccggtggatggactggaacgccccccaggttcagtaccgcgtgcagtggcgccctcaggggacacgagggccctggcaggagcagattgtcagcgaccccttcctggtggtgtccaacacgtccaccttcgtgccctatgagatcaaagtccaggccgtcaacagccagggcaagggaccagagccccaggtcactatcggctactctggagaggactgtgagtatccggcagggcccctcgcccacggttgagctcgcctgcttccaccccagcccatgtccacacctctcagcattggtgtgcgcctttcctaaggatgaggatattctcttacataaccagagcgacgttatgaaattccccacacttcacatttctataattggcagcggtattccagttatatcagccaatgctgcttctttcatttccttgaatctggaacatgaccagatggtaacttgaagtacccggtcaagttttttttctggtttctcctttttttcttttcttttttcttttcttttcttttctttctttttttttttttttgagatggagtcttgctctgtcatccaggctggagtgcagtggagcggtcttggctcactgcaacctctgcctcccgggttcaagcgattctcctgcctcagcctcctgattagctgggattacaggcacgcgccaccacacccaactaattttcgtatttagtagagatgcggttgcaccatgttgatcaggttggtctcgaactccagacctcaaatgttccactcgcctctgtctcccaaagtgttgggaatacgggtgtgaaccatcacgcccagccatggtttctcctttgtataagctactattttcacctttgcaactaataagcagtccaggaagagatcttgagaccatgcaaacacacctctcctcctcaaactgtacctcataaaatatccgaattcgtcttctctgtgtgtaggggcttgggcctggcctcagggctggggtgagagcctatggctctatccaagtcactggtggtttccagacccccaggcaatccctgagctggaaggcattgaaatcctcaactcaagtgccgtgctggtcaagtggcggccggtggacctggcccaggtcaagggccacctccgcggatacaatgtaagggttgaaggcatgggggcccaggagggtgatcactgaggtaaagcgacaggatggtgagggggctttgccacctgccag

SEQ ID NO: 44752 - DNA, 2300 bp, Homo sapien
aggtgaatatggacatggccggtgtggcttgggtttggggtggacacatgcagcagttgagctctgaagactcagacaaagacctagaaattgggactttgagacacacaagaagtgttagaaacactgtcacggaaaatgtcccagagcttgtcctgacccctgtcctgaccctaacctggagcatctggaagggaggaggcctcagtggcctctcttgacccccagggggctgaggagcagcagggggttgttttcctccttcctctcttctcccacaccagttctcaagggaaggcttccttccccattctttctctcttttttttgagatggagtttcgctcttgttgcccaggctggagtgcaatggtgcgatcttggctcactgcaacttccgcctcctgggttcaagagattctcctgcctcagcctcccaagtagctgggattacaggaatgcaccaccacgccaggctaactttttttttttttttgagacagagtcttgctctgtcacccaggctggagtacaatggcgcaatctccgctcaccgcaacctctgcctcctgggttcaagtgattctcctgcctcagcctcctgagtagctgggattacaggcatgagccaccacgcctggcttttttttttttttttttttttttttttgtatttttagtagagacaggatttcaccatgttggccaggctggtctcaaactgctgacctcatgatccgcctgcctcagcctcccaaagtgctgggattacaggcgtgagccaccacgcccagccctaattttgtatttttactagagacagggtttcaccatgttggcctggctggttttgaactcctgacttcaggtgatccacccacctcggcctcccaaagtgctgggattacaggcatgagccactgtgcctggccttttatttttatttttatttatttttttagacagagtctcactccatcacccaggctggggggcagtggcacgatcttggctcactgcaacctccgcctctcaggctcaagtgattctcatgcctcagcctcccaagtagctggcattacaggcgcccaccaccaaggctaattttttttctttttgtatttttagtagagacggggttccgccatgttggccaggctggtctcaaactcccaacctcaagagatccacccacctcagcctcccaaactactgggattacaggcgtgagccaccacgcctggccctttccccattctttcttcattttcctgaaactattttgtgaaatgctgccatcttgggcccctttcctcccttctctatcccacttcccaatccccccattagctttttaggtctgtacagcacccaggcatcagttggctctgaaagctatagcaatgtgactgcaagaagaattcttctctacatgtgtgtgcacacagagataatagatacagggattcatccccacagatacataaagacatacaagaagacacacgtagctagcagacttgtgtgttgattccctcaggcacacacactaacacacccactcatgagtgcaacccctcccagagaagacacaccacagaaataccagctcacatacagctcactccctgcttgcagatccacaaccacacacatgcccacggacacctgcacatgcagacacatacggggatgtgcatgccatgcacaggggagctgatggggcaacaagttggtgctgggaaggcagctggcaggaaaggtgcagacagagagtagagagggaataaaaggcaacctagaggcccagccagggctatctcttccagatttctccctccaaggtggggaggggtgcggatggggaggggagggctggagaagccggccagctgggggcggggctgagggcggggccaagagcccgggcttacccagatgttagtcactaacgtccttccgttctctcgtctctcttcccccacccttcccttcccttctcccctctcccagtgcccccactcccaactcccgccccaagccgcccaccagcccccttcccctccggccggagcctgaaccgagcccggctggctgtgctgcgcggtgccgccgggaaagatggtcgtggcgctgcggtacgtgtggcctctcctcctctgcagcccctgcctgcttatccagatccccgaggaatgtgagtagctgaagggagcctgggcgcctaccttcgccgctatgttgggcccctctttatcttctacctcctcaccttctccctgttccggaccctgactcctc

SEQ ID NO: 44753 - DNA, 2300 bp, Homo sapien
ctgtaggagcagtaggagactcggatcagagagcagatgatcaaacagcagccttgggagctctgagcactggtcttaggagggggaggggaggaaaccggagcaaggaaaagctcaaagaaggaccctcctgcatgtcagaggcttttgggtgctctggaggtcgataatttctgccacgcaagttcctctatttgtcctccaaatctagaatcctggaatggtgtttggcatgtacgctcaggggaaatacaatatccccaaacccctggtccccgctccctgccccatcccagccccatcccatctccccacaggctcatatccaacttcttttttggtctcccagtatttgccacctagcttgccaccgccctgggcagtcggagacaggcaggaagcagccagaaggttgcgagatataacagctgggagggggcgctccctcctctcctcccactgctgctgggtctctgatctctcaccattcctcaggcaattacagagcaagcagctagggttgtcagctcagcaggccctctaccccccaccagcaccactaagggcaaaggagcggggaggggggagtgttccacagatggagccaaggccgggtctgccaagggtgacagacagagtgagaagaggcaggggggagcaggagacaaagacagacgtaggaagacagcgctaaccacgatggagatggttagggggtggggaaattccgaaacggagacccaggcagcagagaaagggagagaagaggaaaccggagcacaaagggtgagaggcagctgcagagtgcgccgctgagaaatggcagaaagagcgagaagagtgaggggtgggggtgggcgtgtgcacgtgcgcgtgcgcgcaggccgcctgcacagcgtccttgtccctgggggctgtgccaggcaaggggcggggaggagggaagatgggcctgggtcagtggaggggcttcccggcgtggacgtcacgctggcctgggagcagggtagagagacagacagagggtggagcagctgtgagctggggccggaggggcctacaaagccccacgcaacagagcatcaaggccctgcccacttgtggcactgggcaagggacggccgtgagacaggatgaatggcacactgctggctgacccatgccatgccagggaacaggtgggggtcgggggattcctgctgcgggtaggaacggggggagggggaagcacccagaaaatcccagggaagccttccaatattgctgctggctgggagtaagtggtcacctggctggaggagacgcacatgtgttaggccaagagtgagcctgcgtgaccatgcactgagtggacagtggccgctgtgctggggcagttgaagatggggccattcctgagtaagtccggtcccaaacccatcctccccggtgggaaagggccagggaggcaagggtcacgcccagcagcctacagggaggggttcagccccagaagagccttgccccatcccaccccacctggcctcccactacacccgcaggtccctcagggagtcctctgtcctctgctccaaagtgcctgctttggtctgatgggaagcagcttgccagggagggacctgggaggttgtggagcctggctagacctggagtgactgcctcctccctgaaaacacacacacacaccccatcaccaccaccaccacacaccttgagaagggaacctccagcggtgccctgcacatgtgccctgcacacctgcctgtcagttctcaggttctgcctggagttcctctcaaaggagaagcaacaagagagcccttcaacagcacagcagagactatccggcttctcctgcccttgtctcctggggacatggtgcctggtgactcagtgggccagagtgggggtggggctgggggctcagcacagggcacatgaaagggtcagagtgtggtgctgggcccatgtgcttgcaggcctgggagcctggggggcttctgtgcctgttggtgtgtatacgatggtgtgggtgtcacctacaccctgtgcactgtgtccctttaaggctcccgctggccctccccgccccgctccccaggccgtggctggcgggtttctatggtgatgcagcccaagtcccagaggtgggggaagccagaggaaagccttgttatgtgttatgtagacagcacataaagggggctgctccagggagcccccacaggtacctgggggcccagaagtcctttatgactgctgcttagtccctgcactcccaacctcacccctccctaaga

SEQ ID NO: 44754 - DNA, 2300 bp, Homo sapien
ctgccatttaccttctgggctatcttgggtgggtcatttgacccctctgaaccttggtttcctcatctgtgaaatgggggcactgatagtgccaatttcttcctggttgcatgactgcccctctctggaccttgggtacctcactgggagagtgaggataataacagcaccatcatctggggtgtgtgtgtggatgcaatgagccagtggagagaaagagaccttcctaactgtgcttgctggacccagccttgagctctgtgggctttggttttctcatctgtaacgtggggcgaatgcttcaacagacctccccaggttggtgtgcaatttaaatgtgcaggaaatgtaacgatggcaggtccatggctgtgctcaggaaatgtgatgtcgtgtaatcctagtaatgaattttttgttaccataaatggacccatcactacacattagcaggtgcgtataaacgggctctattccctgcttacttcaccatcctgatgggcatcaaaccctagattaggtaaaggatttgcagaagttggggcttggaggaaaggctgggaacgtagggagtgagtggaggcagcaactggaaaggagagaggcctatcagagttcagatcagcaaaggcaggaagctgaccacagctcagtgcctcatggaaagtacgccctcttggcccagctcatgagcctgctggcctcgtgacccaggcgggctcagtttcctctgctgtcacctgaagatgccctgcaagtgcccccactctggaagcagtctccctagccgtccgtcttcactcaggtgcctagtcttgtccattctcctcctaaaggctgggcaaacatggcatccagaccctctctgagcacagatgggtccaccccaagcttcccattccaggggaactgaagctggcactatgggggtggggcatccaagccaggatgccagggctgctcccatgtgggccctccagggccccacaccacttggggagtcttgtgagactgagtcgagggcccctggaatgcttcactgggcaacaggcatgcccataaaaataccgtggccgccagatctgcaatctgccatcggggccctaggccttcctagccctgaggctgcagccagctcgccggctccggaattcttaccccctccattttgcttcctcgcctgtgaggtcatggccttgagcctaggagggggcactggggaggagctccttccttctcgatcctgtgcagggctgcgggggagagtgggagagagtggagtcggcgggaaaggtcgaatggggccaatcccgaggacaaagaaataagacaccagagagctggaggaaaatctgggagttgggggtggcagttcgagggataccctctcccagaccctgtctcccctgggctcgcctcctaccctgccgcccacctgggctctggggtgcgcaggagccggtgctccgcggcgcctccccaacacgctgaggacgaagcccccgcacccctcccaacaggaccctgactgggccctcaggatcggggggcattcgggagaggtcccgggagtcctgccctgtgtgtgtgtgttgggggggcgttgcgtgcaggtgcccatcgctggccggcgccgtcgagggccaggccgaggctaagggagcatccccttccttgccggactcctctctccaccgcccggccccaggcctctgggagcactctcgccccgcgattcccgctccgagctttcacagcgggctcccttgcgctggggctgaggacactctccggccggagactcccggtctgcggggaagggggtctggcgggacccgtcggctggggtcccgctgagctcccggagtgggctgcccgggggcccccagcccaagccgcgctcggctggcaccaggggctagggtgcggcggggcggggcggggcggggcgggcggccggggaggtgatctcactcctccctccctctcctccccggcgctcccctcccccgcccctgcgcgcacgcccgccccgccccgccacagccgctgctgccgcagcatcggcatcgcagacgcgctcgggcggcgggtccgaggccggcgtgcgcggaggctgggcgggcagcccgagcggtggccgcagcgcaggtaaggcgggctggcctccccgtgcgacccgggccgcggccgcgatcccccggcgacaccacaccgctctgcccggggtgcacggaccagggagtcccggcccggtccggcccgcggtaaccggcgttgctgccggagccccacccatg

SEQ ID NO: 44755 - DNA, 2300 bp, Homo sapien
gagtcttgctgtgtcacccaggctggagtgcaatggcaagatctcggctcactgaaacctccgcctcccgggttcaagcgattctccagcctcagcctctgagtagctgggattacaggcttgcgccaccacgcccggctaatttttgaaaatactacatactctatgattctatttatataaaattctagaaaaggaaaatctatagtgatagatcagtggttgctaggctttcaggtaggggaagaagcttgactgcaaaaggccacgagggaactttctggaatgtcgaaaatatttattctatgtcatgattgtggttgtggttacacgactgtatacatttgtcaaatcttactgaacagtacaattacaattaatgaattttactgtatgctaatcatacctcaataaagccgaaaaaaaaaaaagtcattctggaggagagaaatcattgcctgcggagggccattccagggtggtgagtgcatgagcactgaagacacccggagcagctgctgcaataatctgggggaggaacgtgcaggcagagagagcaagaggaagtcagactgggaaaccccgaggcagttacccaaacagcccactaacagcaactgcagtcggccgcctctggggaggaaagcgggaggggccactgcctttaaaaaagaaaaaaaaaaaaaatctctgcagttttgccagggagccgcctcctgcctgactctcacatgatgacctggaggccatctatgggtacggccctcaagccctcaacgctcaccctccttctaccccccgcccctcaccccagcacctgctggagaccctggccctcccttccactccgcgaggctcttaatctatccagttccatgggctgcctttccgcagctataaacaggctctgtccagctttcccagttattattcacttaggtgaatggacacaattagatgatcatccgcaggctgtcttcctgtcatcattggcacacgcacacaccctcacacacgcacacaccctcacacacgcacacaccctcacacacgcgcacaccctcacacacaacccccccaacgccacacacacacacaccacacaccctcacacacaaccacccacgccacacacacaccacacaccctcacatgcacaccctcacacaccacacaccacacacaccccacacacacgcccaccctcacatacgcacactctcacacacaccctcacacactctcacaccctcacacacgcacaccctcacacacaccctcacattcacacaagtacacttgagtttttattaaatttgtttttgtccccttcaatcccatcctccaacccgttgttcctccctatctcctgggctctaggtattctccttcgggtcacagtccctgtgagggccgttcctgttgacaggcacttggctccgtccttcccactgcccacaggctccaccatctgcacatgcacccctcccacacaatcgggggcctctttctcctcgtccttggctgcctcctctttgtcttccaccccttacaaatccttcagggccctttaaatgccttttccacctgcctgctccctctagccccgctgcccagtgttaagtgggtcgcaccatttctctcctgggtgacaggcacagcttccaccagcctccctgcctccactcttctctgcagaagcccatgtgctcctggggcagagcccaggtccttccatctctgcagccacagtgctaggccagcggcacttgcagtttggtgaatggaaggttctgatcatggggaaccggtagatagagagggacaaacagtgtccccccaatctgcctcctgtcctcttctgcccagacactaggctggaagatcaggagccacaccttggcactcacagagccctttctgcaagtcttagagggaccagtgggaggtgtgcacacaggggctgcgctggcaggagtgggggcctggcacacccccaggtagatgccctgcccgttaacgcccaagggcaggggcttgagtgactcatgtgggcctagcgtgaatcagcacagtctgcccttcttcccatgggagctgctgcccagccccatctttcttggcccccgaggggtggctgcccagggcctctctcctggcacagttccatgtagtgcctgcccatgtggctcccagttcctccccggggtcctggctgagcagaatggcactggatcctgatctggcttcttgcatcccagaggagaccgccatgcgggcccttcctccagattcttccc

SEQ ID NO: 44756 - DNA, 2300 bp, Homo sapien
tgctgagatccggcactgcacagcctcgttcaggcagagaaactgataaggagatggttgtctgctcaccccaaaaggttagcatggattcctcgccctagccggctttagacggagggaacaaaggctttcccaaggccctgccagtccccacccctgcccatcttaccaccgtagtctccctcaatcatcaagtcccattgcacagaaggggaagctgaggtgccaagagctggcgtggcctgttcaaggtcacactactgggcaggggccaagcaggggctggagccttgctttcctattccccagccagggtccccaaattctctgccagttgagggaagccatctcctattccactgatctgggtggcattaggaaggccttttctatgctcctagattagtgacagcatgcggttattggggacagcatgaggatgtgcatgcgctgaggagatgcagctgaagcgtcaggcctggggtgccagcactctgcagcctgcccccaaggggctctgcaaaaacatggcaaagatgcggggtgtgatgtgcacctgtgtgtgctgcgggtgtgtgcgtgtgtggtgttggctgtgcgtatgtggtgtgtatggctgtgtggtgggtacatgtgtgggtgtgtggcgtatgggagtgtgtgatgtgtgcatgtgtgtggtgtgtaatatatgtgtgcatggtgtggtgtgtgtgtggtgtggcgtatgggtgtgtggtgggtgcatgtgtgtgtggcgtgtggctgtgtgcatgtatgtatgtggtgtggtgtgtgcgctgtctctggaaaatgcccaccctgtgttcccaccaccctaacagggccgggaggggccagggtgctgccaggctctctgggcaggaagaggaggccttggccgcgggccggacttgggcctggtccgtgaggctgttttggtctctggcttcacaggcaacagagaagacagacaaacaggaagaaagcagctgccttgggctgggctgggctgggctggcctcggctgagccaagccaggcctgggtgcggggggagtggaaagagaactactgggatgggggctggagggggtgtggggacaggggaaggagagaggtgttgggggagggaggaggagggctcaggtacagggaaggtgcgtccatactcatggtatgttcaagaacatgagcgagcgtctctgtgttgtgtgtttgtggctgtgtggctgtatcatgtgaggttgtgtgtggtgggagggagcccgtgagcacacggaggtccccagcccctcttcctaggacaggtagttgcaggtggggcaggaggaagagggtgggggtgtccctggatctcacaggggttcgtgaagcctggcttggcccctgccccactcctccctttcctgtccctcgtctccggccaactgggccctaactggggaggaggaggggcctgcgtgggcctgggaggggcccagcgaaagtgttttcaccccttccttgcctgggcccagcgaggagcaggaggaccccaacttgggaagggggcgtgaagctcccatgaaaaagcagcgcagtcctgggccagacccaccgctctctggcctcagtttccccacttataaaatgggaatgctgaactaagtgacctcccagagcactgccaacccagacaatccaaccaggggggcgtggtagggtgagggtgggcgtggaggctatggcagtgggaggagggagtcctgggccgggaccagggaggccctggggaaaggaagggaaacaggaggccaggggaggcctgggggaaagggggagggggaggaagtcccctcctggccaggtcactcccagaggctgggctgggccagggcagggcagccgatggagagcagatctgagcacccagccaccttcacgccaccgcccagctgcccaggagcccagccaggtaaggggctgcgcctgcctgcccccctgcccagtccccagccctcggatggtggcctctctcggcctcggttggggcaggggagttctgcgtgtctgtctggggtgcccactcccaaacccgggactcatgggctgcctgggggatcctgggttctgtgcatccgtctgtctgaccatccctctcaatcttccctgcccaggactggccatactgccaccgacacgtgcacacacgccaacaggcatctgccatgctggcatctctataagggctccagtccagagaccctgggccattgaacttgctcctcaggcagaggctgagtccgcacatcacctcca

SEQ ID NO: 44757 - DNA, 2300 bp, Homo sapien
ttctccacacctggccccctcagagccagctcccattcactgcaggacccagtacacacagagaaaattccagaagagccgccagccccgccccagctcccagtataaccagagactctttgggggagacatggagaagtttatccaggtactagctttgccccacatgccagcccacctgtacatgctgatctttcttcagctctgggtcacctcagtggccggagcagctgcctgatcccagggtcctccactctcaatcagtcatcaactgtccttttctgggtgggcctcttccaggccactgttgggctcccctatagcctccgctgattgaagggagcatccttaactagtaatgggaacgtatagaaaacctggggcagcggcatttttaggggcgagatattgagagcttctcccctgcgacttctggccagcatggtactgggggtcctggacagtgaaataaggggaagcaagaaagatcagaaaactaatactgagatcagaaagcatcagagggggccaggcacggtggctcacacctgtaatcccagctctttgggaggctgaggtgggcagatcccttcagcccaggtgttcgagaccagcctgggcaacatggtgaaaccccgtctctactaaaaatacaaaaattagccaggcatggtggcacgtgcctgtaatcccagtgaaagaaagaaagagagagagagagagggaaggaaagaaggaaggaaggaaaagagagagaaagaaaagaaaagaagcaagcaagcatcagagagggccaggcatggagaataccagaagatcagaactgatatcgtcattttcagtgatgtggttatgcgtgtagcatattcaaaagaatcaacagattctttaaacgagcactttgagtttctttctttttttttttttttttatttgttgagactggttcttgcactgttgcccaggctggagtgcagtggcacgatctcagctccctgcaaccttcacctcccacctgctggggttcaagcgattctcatgcctcagcctcccaagtagctgtgtgcaccatcacacctggctaatttttatatttttagtagaggtgaggtttcaccgtgttggtcaggttggtctcgaacttctgacctcaggtgatcctcctcccttggcctcccaaagtgctgggattacaggcatgagccaccacacccagcttgagttttgaaatgttacttgattcaagattggtgtacagaattcaattgcatttgtatattccagcaacaatttgcaaatacaacgtaaggcactgcctaaaacctcatcaaaaatatcagacacctacgagtggatctaacaaacggtgtgctaagcctctgtgccgacaacgatgatgtgttcttcagagaaaataaaagcactcagcctggtgcggtggctcatgcctgtaatcccaccattggggagcttgaggcaggagtatcacttgagcccaggaagctgaggctacagtgagccgagatcacgccagtgcacttcagcctgggtgacagagtgagaccttgtctcaaaaaaaaaaaaaaaaaaaaaaagcaattgaatgacaacacagggcatgctgtgtccatggtgaagtaaacaccctctgtccccagagctcaggccagcctgtgcccctggtggtggagagctgcattcgcttcatcaacctcaatggtaagcaggacccagcccctcccgatgtcctggcacccagcacccagttcccagcacctggcatgggaggccatcctggaggggctggggaagatgctcagtgcccaccagctccttgtcctcccacaggcctgcagcatgaaggcatcttccgggtatcgggtgcccagctccgggtctcagagatccgtgatgccttcgagagaggtggggacgggcagggcgggcgggggtgggggctcgggcagatgtcaccagcttcctccccctaccgcaccactcgcccatctgcaggggaggacccactggtggagggctgcactgcccatgacctggactcggtggccggggtgctgaagctctacttccggagcctggagcccccactcttccccccagacctgttcggcgagctgctggcttcttcgggtgaggctggggcctgaggctggcggggtagggcacttgctggggcagccccgctcacgcggctctctctgggcggctttggccacagagctggaggccacagcggagagggtggagcacgtgagccgcctgctgtggcggctgcccgcgcc

SEQ ID NO: 44758 - DNA, 2300 bp, Homo sapien
ggcagtgtcttccggttcgcaagcccgcggcgaggttcgttcccaggctctgattggtccggcggcactgggctcgcgcgcagggtgcgggggaagggcgggcttgcgcactgcgtcggccgcgccccggcaccggtggaagggaggtgtcccaggctcccacggcgcccgcggcgccctccttccgccccggccaggcccatgggacccggcccgccctctgccgtccgtccccggcgggcccgatgcctgtcggccgctgagcctccgtccccatgcgggcaggtccgcgccttctgcgggctgcctggcttttggatgctttgaaggggaacaatggagcgaaggatagacggagcagcagggggcagttgcgttcagggccttaaatgccaaacaagtgccctaaaagccagggcccaacactcaggccctaaagtacgggctgaatggggcatcctaggaatagctctggagtgaaaaaaggagtgaagagagcgtttgaaggcaccggctgaggcctttcctgcctgcctgagccctgtggctggctctgctgggtggagggacctttggggaccagtcagggctcggatggaggggcaagatgtgttggggccagctagtgagaggcggggctccctggttccccttggcctgaggcagcggtgggacgtgtgagtctcccgaccaggagcaggttggagtgtgggtgcggctgtacgcgctgtgggcaggggcgcaggctctctagtctcgctggaggactcgaacatcggtacttccgagaccagctgctggaagtccaggtcctgggtctggctagctcccaggccttgaagccccaggtcctgcagacacacacgacgacgtgttcgagaagggccttggtactgggagaagggggcggggagctgagggagtgtttttttccttctgggcaagagaattaattgctcacagttgaaaggcaggaagtacccgcacagcctcccctccccagatctgcaggtcaaggtcatgtgtgcccgcatttgcacagagcctgactctgacatccgtgcacacacacgcctagtacccctgcactagtgcccccacgcccgccttcggaacacacgcctggtgcccaagtgccttgcctctctccccacatctataccccagggatttccctcccaccaaattgaagccagttgtctgcttggcttgtcaaccgcctcccgcctcccgccttcccgatttcccggagaaaagctgctgccctgtggtagagggtggaggaaagccccaccacccctggatgaggggggccccaagacttgcccccagggtagctaagacctcactccgagggggctgcccccctcaggcctatgacgggcaggtgcagctgcaggggaagggaggcagagcagtctcttccggcagcaggaagtggtaaccgcctatggggaaattgtggggctgagcagaaggggaaccggagctgaactctcctcccctaccaagggggcctggagggaacggcagccagctgctgaggttctgctctctggtgctgaccttccttccccctcccctctgaacttcccaccccagctctcaaggctccctggggctccctgggcctctctgggggctgacttgggaagggaggaccccatcggatgtctgggggaaggaggcaacccagggggagtccagagcctggggcagcaatggtgttcatggccactggtacagtgggccagcggccccgctgtgaatggtacagtctggcagtggtgaccagggacagccttctggaggtggtgggatggcagcctgggatgccagcttacgttggggctctcacacctgctccggctgcttggcagcggggctttgggcacaaggcagcctaggtgcaggcccaatgggaggggacggcaaggccggggcacagtggggctggaaggggcgccctgcccccccaggagcccctcgcgggcagtgccagccctgggccgccccgccccaccgggagccgcgctgggggcggggctgggcggagcccgcgcagggtgctggccgcagcgcccccaagtcccggcgccgggcccgctcacggccgcgtgggagcagtggggttcgacggcgcggccgcgaggccgccatggccgctcacgggaagctgcggcgggagcgggggctgcaggctgagtatgagacgcaagtcaaaggtgagagggcgccgggcgctcccggcccgtttcctgcggagaacccaaggtcgtgagggagctccaagcgtcccc

SEQ ID NO: 44759 - DNA, 2300 bp, Homo sapien
tcaagcgatccttccacctcagccacccaggtagctgggactacagctgtgtgccatcacgcccagctaattctttaattttttttttgtatagatggggtctcactatgtttcccagcctggtcttaaactcctggcctcaagtgatcctcccgcctcggcctctcaaagtgctgggattataggcgtgagccactgtgcccagcccaggactagttttacttcctacaaagaagaatacaccaactcttatgggccaccatttaaagagacattttcatagtggacttcaatgtaattgagtccatgatccttttgagaaggggctgaactgacaagcctccctgagacaggtgccccatggaatgctagtggagagagaaggaaagagagtggaatgggcactgggcaggggcagagggaggaggagatgagtttgggaccaatggtgagccaggacaggagtcagatgagattgtgcatctactggaagacaggcctgtgaagccgggaatgggagctccaagggagtcacttcttaagagtttcatgacaggtcgtcgcctccatcagggttctttgtttcttttcttttcctttttttttttttttttttgagacggagtctggctctgttgcccaggctggagtgcagtggcgcgatcttggctcactgcaagctccgcctcccgggttcacgccattctcctgcctcagcctcccgagtagctgggactacaggtgcccgccaccactcccggctaattttttgtattttagtagagacgggatttcactgtgttagccaggatggtctcgatctcctgaccttgtgatccgcccgcctcggcctcccaaagtgctgggattacaggtgtgagcctttgcacccggccgggttctttgtttctttgaatcaacgtaaccacgactacaatcacaatagagaacttttttgtttgtttgtttgttcgtttgtttgtttgtttgagatggagtctcgctctgtcacccaggctggagcgcaatggcgtgatctcagctcactgcaacctccgcctcctgtgttcaagctattctcccgcctcagcctcccgagtatactgctgggattacaagtgcgtgccaccacgtccggctaattttgtatttttagtagagatgaggtttcaccatgttgtccaggctgatcttgaactcctgacctcaggtgatccgcccgcctcggcctccgaaagtgctgggattacaggcgcaagccacagctcccggcccgatagacaacgtttctacaccccagggcagagttctttcattccatctagcagtgtctcatccccttgcccagtcggttatatagttgtagcctgcctgctgcgcccacccctgctttcatctttgtggaggacgcagtgtcgcggttaagatcgctggttctggagccacgtcacctggggtcaacccaggctctgacccctggtagcgatgcagtggcatctgggcgggtcctgcaggcgctagctgtcactgtctctgttattccagtttcgcgatcccgagtacggggaatggtttggctacctgagccgagagggcaaggtggccctctccatcaagggaggtcctttcaaaggtgagtgggggagagggcggggccgcaggggttgcgcctctcggctgcccccggccctcactacctgcccgcctctacccgcaggctgcttccacgtgccgcggtgcctagccatgtgcgaggagatgctgggcgccctgctgagccgccccgcccccgccccctcccccgcccccacccccgcctgccgaggcgcggaataaaggctgagtccgctccacctgcggctgtgcgcgcgtctgtgggctcgcgggaggggggctgtcgcgccgagggaggggccggctccagctccggggcagcgcccgccccgcccccaggcccgccccgcgctgaccggctccgcgcattggcccgccccgtgcgctggcctgtcccgcgcattggccaagcggccgggaggacgggcccggcggccgtgcacttccggccggtggccggcccggcgcgcaccgccccttccgccgtcgcccagcgagcccagctccggtcccagccccggccgtcccggcgtcgcttcggagcgcggcggcagctgactgcgccttcacgatccgctgggacccgcgagccccgccgccgttatgaacatccgcaatgcgagggtgagcgcccggggcgggaggctgtccgcgccgcgtgggcgccgggccgggtggctgccgcg

SEQ ID NO: 44760 - DNA, 2300 bp, Homo sapien
gcctttgtttcccctacacacctctactgcccagccttcctctcagagcacccaggcactccgctaccagaagctcctggagtaaccaaagcctccgtgtctccacctgtggcatgggtgtgtgtgcaaggccctgtcgaatgcgacctcttctgggaagcctctgtcctgtggggtctgctgtgtcatgtgggggtggggggaagcagactggccagggcttgacaccaggagccatggctctgtcttacccaccgcaccaactgtgacctgccttggagcctagcctcgcagaggcccaaggagaggggtgggaaagtgtccttcagagcagagcggtaggagtcatggctggggctggtggaggccaggggccacatggggctggccccagaaccgaggggccttgcggatttgccatacctttggcaaatggcgttgtgggcgcttcgcctggtgggggtggtacaaggcttcttcctaccccacttctgtagctggcacctgtggggctacccaccctccgcattccttcagctcacttgtctcaccgcggctgcatcacactccacaaggcaagggccacatcagtcatgcctctggtgtttatctgaaaataccgcgtttccgtctgagggcaccactcagtctggggaggcaggagggaggctggacatgaatgtgaacatgacaggcctgtgagcagggcaggtagatacagcccggctgggcacaaagctcatcccctgagcatgagccgaggccgagggtgggtgggagcacacagaggatgcctccccagctgccagggcatcagcctcattaccaagcaccccaaaggggaactgtttggggttgggtgggtcagcctgcagcagggactgagacagccactgtggcatcaaagaccagcagtgcagtacccacgcccagaggctggaacccattttgtgcactgttggcctggaaggtaggaaccacctcagcccagctgccttgtagcatcatcgggtcagtcatagagctacagacagatctgggcagctggaaaacaggcccagagaaggggggtgtgggctgttacctgcagttactgtctggccttagagctgtgtcacttgtgtaaagaagtcagtgccaaggccgagcgcggtggctcacacctgtaataccaacactttgggaggccgaggcaggtggatcacgaggtcaagaatttgagaccagcctggccaacatggtgaaaaaccgtctactaaaaaaaaaaaaaaaaaaaaaaaaaaaattagctaggcatggtggcaggcacctgtaatcccagctactccagaggccgaggcaggagaattgcttaaacccgggaagcggaggttatagtgagccaagatcatgccactgcactccagcctgggcgacagagcaagaccccatcttgggaaaaaaaaaaaaaaaattagcgccaatggctgcccattactgactgttgaggtagttggtgacaaactgattcaaaagagaggacttgctaggctgggtgcggtggctcacgcctgtaatcccagcactttgggaggctgacgcaggaggatcgcttgagcttaggagttcgagaccagcctgggcaacattgcaaaaccctgtctccactaaaaatacaaaaattagccaggcatggtggcccacacctgtggtcccacctactcaggaggctgaggtgggaggatcgcttgagcctggcaggtcaaggctgcagtgagctgcctgggcgacaggacactgtctcaaaaaacaaagaaacaaacaacaacaacaacaacaaaaacagaacttgcctcctgtctaccctgtgtggtgacaggtcagagggacctctgcattcaggcccactagctgttccctgtcctgctgcacccctgccccacaggcttggtagggccaaggccctcagccgccctgccggggcccctggtgtagggcggggtgggtggcagccccgttccccctcatcccagaccctccggccatcccagcttttcccaccaagcaggatcttgagaccagagctcccagcaggggccctggagggactggcccattcgagtggagggtcgcggcaggaacaagtgcgggggtcgggctcaaagccccgccccaggcccagcggaaccctgaagaggagggggagggtgagccgggcgcggctgtgtcagctgagtgacagtcacgggaccgcgaccaactctgtctggcttcctagaggagcaggagggatgagcaagggtctcccagcgcgacaggcc

SEQ ID NO: 44761 - DNA, 2300 bp, Homo sapien
gcacgggagcccgggggccgcagccctgcttttgtgcagttggcccctctgagcagcaaagtcaggctgagcagcccaagcattaaggaccttcctgcggggcgccacagccatgcggtcagcaccgctgccatgacccgttccagcgtgggtgctggggagccccgcatggcacctgtgtgcgagagcctccagggtggctcgcccagcaccacagtgactgtgacagccctggaggcactgctgtgcccctcggccaccgtgacccaagtctgctccaacccaccatgtgagacccacgagacaggcaccaccaacaccgccactacctcgaatgcaggcagcgcccagagggtgtgctccaacccgccatgcgagacccacgagacgggcaccacccacacggccaccaccgctacttcaaacgggggcacgggccagcccgagggtgggcagcagccccctgctggtcgcccctgtgagacacaccagaccacttccactggcaccaccatgtcggtcagcgtgggtgccctgcttcccgacgccacttcttcccacaggaccgtggagtctggcctagaggtggcggcggcacccagcgtcaccccccaggctggcaccgcgctgctggctcctttcccaacacagagggtgtgctccaaccccccctgtgagacccacgagacgggcaccactcacacggccaccactgtcacttccaacatgagttcaaaccaaggtaagtgaaggtggccagcctggctttcatggtctcccagccccccaggctgaaaggccaagacaacgatggcgggggtccgtccagagtccaccagtcaggctccttggcacccaatttaccagtggggagagctggggcgtcctggctgtacctgaagcagacagaggtctccaggagcctgtcctgccttatctggccctccccttggtggtagaggaagcctgtggtggtcaagccaagtacaggccgggggggctcctgctgagcagccgcctgcctgtcgcccccacagaccccccacctgctgccagcgatcagggagaggtggagagcacccagggcgacagcgtgaacatcaccagctccagtgccatcacgacaaccgtgtcctccacactgacgcgggctgtgaccaccgtgacgcagtccacaccggtcccgggcccctctgtgccggtaagagcccagggggccgtgttcttccccgccttcccggcctacgcccgtgcagttccacactcagacgccagatgtcgctcttgtaccaggcatggggccgctcctggtcccttttccggaccataaaagggcagcctcggtgcctgctgcggcaggaggcaggagcctcaccgtcccccgcatctctggggcgcttttatttctgggactggttctcatcgcgtgtcacttcaccgcagcctgtataagacatggcgggggtctgagtgcccatttgtccaggccagggtgactgaggacgggttaaacctgaccgggggtctcaagggcctttctcctcatgctggtcagagaaccactgtcccctccctatttaacatgggctggagctggcccatcaagaatgaaaacttaggcccacaaggaaaggtgagggctggcttgcttctcagccctgctgcctggctctggcccctctcctcccctctgacaggggcttctctccctttctagaagatctcatcaatgactgagactgccccaagggctctgactactgaagtccccatcccggccaaaataacagtgaccatagccaacacagaaacttctgacatgcccttctctgctgttgacatcctgcagcccccagaggaactccaggtgtcgccaggtcctcgccagcagctgccgccacggcagcttctgcagtcggcttccacagccctgatgggggagtccgccgaggtcctgtcagcctcccagacccctgagctcccggccgccgtggatctgagcagcacaggggagccatcttcgggccaggagtctgccggctctgcggtggtggccactgtggtggtccagccacccccacccacacagtccgaagtagaccagttatcacttccccaagagctaatggccgaggcccaagctggcaccaccaccctcatggtaacggggctcacccccgaggagctggcagtgacggctgctgcagaagcagctgcccaggccgcagccacggaggaagcccaggccctggccatccaggcggtgctccaggccgcgcagcaggccgtcatgggtgagt

SEQ ID NO: 44762 - DNA, 2300 bp, Homo sapien
gctgtgggctttgaccacgagggtgctcaggggagtgagggtggctgcctggacatgggaccctagggaaggcacagatcggttgcttcaagtcagtgatggggctgttgtctctgtctctgttttacgctgtgacctcaggtgtcgcttgccctcctgggctctgcccctttacctaccgagagcagttggcccaggcagccttaggtctcgttatgcgtttaccctggtagcttgcatggagctccctccagggattggtcaggacggctctccagtgcgcaaggctgttggccttggcagctcttgcttttctggggtggtttttgcactgggaatgagaaagaggcagagggccaggatccgagcttgcacatgcgggcggcacaggtgttgtccctctgctttagggaaatggcaggggagctctagtgctcggcatgtccgaggcccagtgactcagctgaatggctgcagaggctgtcagcctgctcgaagcctacccgcagagtgggtgctggagagcggggtgggggtgctctcgcctcaggaggagcggtggtggtacagttgtgctgtgtggggttttctgttttttttgtttgtttgtttgttttgaggttaggtcttgctctgttgcccaggccgggatgcagtggtgcggtctcagctcactgcagcctcaaactctgagggtcaggcagtcctcccgcctcagcctcctgagtagctaggaccacaagtgtatgccaccacactgagccagtgttttaaaattatttgtagagacggggtctccctgtgctacccaggctgggagttgtgctttggataagggctagccttgcacacggttccgcattgagccctgggggtgacagtgtgagactgggtgggaccagagtgcagtggggcatgcattcccaaccatggtcagccgcctggccctgggtgcacacctgaatatggaaaaaaaacactgtttttcctcttctatggtctcacaacacttttggccaccaaactgaatagtctgtattatatcacaatatcacagcatccctgtgtggaagccttcccaccccacaggaatccccccatgccctgtcacgtcctgggggacccatcttgcgtcttgagtcatgtggaggggcctcagttccttctgccgtctgcttgctgagatctcacccaggccagctcagaggcacagagtcggggttgcacctggcccccagtttggggtttctggaaagagtgtggtgaatcctctgagggacccctcataggaggaggttttcggggaagccctggcctgccaggtgtgaggggagtcaagtttgaggacatgagggaggggcctggtcccagctgaaggctgctgtgccatcctgtggaagcaaagcagtgcctaaggtctgatttccctctttcttggtggtcgcctcaccctcatgagcttttgagaagcttctgtcacagctctgctgagactgctgcctctggcttgcaagaatgttctggagtaccataggtgtggcagcaggggcagggagggatgctggtggaccatcacctaggagaccagaggaagtccgggaggtcagagcagaggccgggtctcatccccatggctcttcgtagcctgcagcggtcactgttttggccacttgaaagtgctgctctgggctctggctgtcctgaccctgtgatgaagggacaaaaatgtgggctccagggaggaggagcacaggcccaccaagagggtattttggggagaaattcatgtctgatcactgagtgctagggaaggaaggcagtggctagattcccagtagctgatgagggatcttgcacagtaacttcccgctcattaagatgaccttggcgagaagcagggtggtcacaggctcttttgcactggcctgaagtcgaggggtttggaagatggcccaggtagcgcagctggagttgctagagcgcccgcagggatggtgctggctcagcccctctcaccaagcttgacggctggcacatttggggaatgagaggaatgggggctcccgggtgttctgacttctgcctccttctgttccccagcaaccaaccagtggttcatcccagccgtgaggggggacattccccctgggtgtgcagcctatggcttcgtgtgtgacgggactcgcctcctggtgtttggtgggatggtggagtatgggaaatacagcaatgacctctacgaactccaggtaaagcagccccaggttctcactctgcctccttggccccatgtgacctga

SEQ ID NO: 44763 - DNA, 2300 bp, Homo sapien
ggaggggagaagggggagggggacggggagaggggagaaggacgggtaagggaggaggggagagagagagggaagggtagagggtgagggaggagatggagggagggaggagagggagggagcagatggagggagggaggaaagaggagggagagggaggagatggagggagggaaagagccgaagacccagcgggctttgcactcacccgtgttgtacacgtgcagttcgtccactattccctcgttgccgccgccaaacaccacgatgagctccttgatggccacggcgcggtggccgtggcggggccgtggcaccggacccgaccagcccaccactcgcttccagcggggctgcagaagcaccgctggcaagttggcgggcgacacggccgaagccatagttccgggaaagggtgcggtggggagaagtcaacaagcgggaagggagcccctcaattcctttcacacaccccctttcgtctaaggcagctctcacggagaagcggtttctcacacagcggtagacgactccatggaggccgccatcttaactgccctccttccctttggctcttccctttcttctcgctcaccccgtctccgcaagagccgcccgaaactgtcgagcgcctaggctcaagaagctggaggccgctgagtcccgtcgccccgactacttgtccgggcgctcccgcttacaagctcgggcgggaggccctgggagccgccatcttgagccgcctctctctcctcccttcctcagtcgtagccctcccccgccggaaatggcggagccccggcccggttcccacacccccaagtccccagcactggccggcttccggggcgggtggaaaggagccacaagcgccgcggtcgtcgcagccccgccggcgctcagaccacaattgtgggagccgccatcttgagaccgtcccgcttccccgcccagcgccttagtgcagccgccgctcccgaaacagcctcgacacacctaacgaatggaggcgggccggaggccggtggaaccagctcgagctctcgagggccgtttgggggctcgcgccgtacggcttgtgaagtctcgcgcctctccccttagtccgcctctgctgctcaggctgcgcctgccgccgtgggagccgccatcttgagactagctccccgttcccccctattctcttcctcctaggtcagttcttccactgcacaccaaactcaaggcggtgtccgatcctcacttcccgccttatgactccttcccacaggagccgcttcaaagagctagagttaggccccgaagcggcaactgtacggcagaagaagcggtaacggcagggcgctcatgcctcctccctgggagccgccatcttgtgtgaagaagtaacaactaaacatggcggcagcggcgccggcggtcgggcgaggaggcggagccgggtgacgtcaccgcttccccccactcgccctcgcaccgcttcgcccctgggcccaagcctcttaaaggacccctgcgctgcctcgcggcgggggtgggggtcggcgctgccgcgcgctgggctaaagctcgagtcgcgctcagatcaggtgcaggcgcaggcgcgccccgccccacggcccccccaccgggcgagcctccacgcctccgccctgggagccgccatcttgccacttcccctcgcccggccgtccgcgggcgtcaatagcgactttcagcacaaaacaaagatggcggcggcggcatctcggaaatgcccggatgagactgctaacccctccgacgcgctcggccccgcccccttgggaacggtctctcgggttgataagggacgcacgcccgaagaactgcctttaaccagcactggggacagcggcacgcaggtggccggggttggcgaacagccactgcagccgcgcctgcggccgggaagcgagcattttcgcgccctgcacacccagcagccgcaggaggcggcccgaggcgcgccgcgggggagccgggggcggggcgacagtgggaggcgacgcagccgagcgccggcgcccgggggtggagcctccgcccgctcccaggctcccaggctgcggggcccgccctcgggcgccaccgcctccgcccgcgccgcagcaaaatgagccgggccgcgcgccccagaccgccgcgcgctcggccgcccccactgccgagaggcccgcagtcgggccggtggcgcacgagccgggcgggcgaccgcgggaggcgtccgcgtcatctcgcgtcacctcgccccgcccgcttcccaggcttcgagtcccgcc

SEQ ID NO: 44764 - DNA, 2300 bp, Homo sapien
tacaggcatgagccaacgcatcaggccttagttttcttatttaccatgggtgggggacttggggacatatgtgaggtaactagccaaggtcacaaagagcaggtggtggcacagacaggcaagaattcttctctttgtcccttctcaaatggatacttccaactgcatgaactaaaacacagacgattacaaaatacatgtaatatgttgagaggcgactttaaaaatattgttgaaaatgtgtgagagggtgacgtgtgcttctttactaacgcattaaattacaaggtcttccagcaggacgcataacttcagtaacttcaaagtaataattctgcccgccggtagatctggtagatcttgtaatttaactgaacttctagacgtttacaacaaaagccacaggctctgacaggaccggtctgtccatttctactggcgactgccgctcccgggcagcagcttgggtccccgcgctgcggcctgcgcgtggcagggcggatgccgccgccgccgccgccgccgccgcgcccgggcggcctcctagaggaggcgaaacgtgggggcgaggccgggacccacctcccagggctgcggtgagcacttacagtattggcgcgaaaaggccagctatcaccatacgggtatttcgcctcactcgcctcgctgggggaaattcaaatctccgaaaagggaggatccgagcagcgccggtgcgcctgcgcgcagggcgggactcgaagcctgggaagcgggcggggcgaggtgacgcgagatgacgcggacgcctcccgcggtcgcccgcccggctcgtgcgccaccggcccgactgcgggcctctcggcagtgggggcggccgagcgcgcggcggtctggggcgcgcggcccggctcattttgctgcggcgcgggcggaggcggtggcgcccgagggcgggccccgcagcctgggagcctgggagcgggcggaggctccacccccgggcgccggcgctcggctgcgtcgcctcccactgtcgccccgcccccggctcccccgcggcgcgcctcgggccgcctcctgcggctgctgggtgtgcagggcgcgaaaatgctcgcttcccggccgcaggcgcggctgcagtggctgttcgccaaccccggccacctgcgtgccgctgtccccagtgctggttaaaggcagttcttcgggcgtgcgtcccttatcaacccgagagaccgttcccaagggggcggggccgagcgcgtcggaggggttagcagtctcatccgggcatttccgagatgccgccgccgccatctttgttttgtgctgaaagtcgctattgacgcccgcggacggccgggcgaggggaagtggcaagatggcggctcccagggcggaggcgtggaggctcgcccggtgggggggccgtggggcggggcgcgcctgcgcctgcacctgatctgagcgcgactcgagctttagcccagcgcgcggcagcgccgacccccacccccgccgcgaggcagcgcaggggtcctttaagaggcttgggcccaggggcgaagcggtgcgagggcgagtggggggaagcggtgacgtcacccggctccgcctcctcgcccgaccgccggcgccgctgccgccatgtttagttgttacttcttcacacaagatggcggctcccagggaggaggcatgagcgccctgccgttaccgcttcttctgccgtacagttgccgcttcggggcctaactctagctctttgaagcggctcctgtgggaaggagtcataaggcgggaagtgaggatcggacaccgccttgagtttggtgtgcagtggaagaactgacctaggaggaagagaataggggggaacggggagctagtctcaagatggcggctcccacggcggcaggcgcagcctgagcagcagaggcggactaaggggagaggcgcgagacttcacaagccgtacggcgcgagcccccaaacggccctcgagagctcgagctggttccaccggcctccggcccgcctccattcgttaggtgtgtcgaggctgtttcgggagcggcggctgcactaaggcgctgggcggggaagcgggacggtctcaagatggcggctcccacaattgtggtctgagcgccggcggggctgcgacgaccgcggcgcttgtggctcctttccacccgccccggaagccggccagtgctggggacttgggggtgtgggaaccgggccggggctccgccatttccggcgggggagggctacgactgaggaagggaggagagagaggcggctcaagatgg

SEQ ID NO: 44765 - DNA, 2300 bp, Homo sapien
gtgtatagccaaatgactgaaagcactgatatatttaaaaacaaaaggcaatttattaaggaaatttgtaccatttcagtaaacctgtctgaatgtacctgtatacgtttcaaaaacaccccccccccactgaatccctgtaacctatttattatataaagagtttgccttataaatttacataaaaatgtccgtttgtgtcttttgttgtaaaaatcaagtgattttttcataaggttcttttactattggaaaagatgggcagcacgcagttttattttatttttgtaagttttttaatacatgtgaaagcaaagaatactcagcatgcctttctaagtgacgcgtttgcaccttttgttgggaagtactgtatcctgtgctgttagcattctcgataaatctctctgtgaaagtgactcaaggtctgggctttcattataagacagaagtccccctccagctcacatgacagcatggtgctgcgtttcctcattggatctggctgtccctggacacaggtagctgccttcaggcctgccacgagcggccaagggaagcctcctccatatgctggcctcgctggcccctcagcttcttccaagccagtgctctccaggcacactgctccagcgtgtgacgggaagggcctggcatgagtcagcctgcagcacaacctccctgctccagacccgtatggtaggggcaccccctaggtctggatgtgctgtggtgcttttggacacccccacccccgcaggctgtggctcctcctgtgtctcattctggccaggaccctcacgtgccctctgttgactgctaacgtggttctctgaccaggcaagggcaggctgaggggtttgcccaaagggggcccccttgttactggcttccttggctctcaggagcagcctcaccaggttggtaaggggctggaggagacaactgctcaaaggagtccagcttcacatgcacatgctagaaggtaccctcggaaggcctggccttcaaaggtagatcccagggttgaaaagtcaacttgtatgcattgagcatctcgtatgccagccctgttccgtgagctgatgggcctttgtgtgtaagtaggaccaagtgcccccgtggaggttagcatgggtgtgcagtcatttcagatacttgagttggtacatctcagtaaagtctgtcccgtgagaagccatgggtttcatggtatggttggcatcttccttgggagtggccacagtggtggtggcttcaggaaagagactccaacaggggccagctgtgggccttgggcacttctcgtttctaggaaaagtcctaagtctgtagggctaggggtggggaaccccttcgctgtcaggatcaagagggcaaggggaactgtcgctggaggagacatccagctggagaaacaaaagagtaagtctgcgttgctgcttgtggggtcttccccatctcagggcggggaccgggggtggcggtccagacaagtaatcaaggacgatgcccaggaggggacaggtacggggtggcaggagctctgccggcgggctcaggaagccttcaccacagctgcctgagctcacccttgccaaatgagggctggggcagcagcaacgcatacactcacggctgtggcgggcagcgttctcggcatatttcaggacacctaaggagactgaatggctcaaggctgctgccgtgtgcagggggctagacgtggggcgggcaggcagggctcctggtaacagccctgcaggccgcagtggagagcagggttccggcagggccgcccaggagctttcggaaggcccggccccggcccctttccgagcagcccgggcctccgccctgccctctgtccccaacgccgggagccgccgttcgtcctccagagccccgcccgggcgagcccgggaggccgatcgccgctcgcggaacccgccgggacccgggccctccccggcgcggggcgcccccgtgtgacccagcgcgcggccgcggcgcgcaagatggcggcgggcccgggcaccgccccttccgccccgccgggcgtcgcacgaggccggctcgaaggggaagtgagtcagtgtccgcggacccggccggcccaggcccgcgcccgccgcggccctgagaggccccggcaggtcccggcccggcggcggcagccatggccggggggccgggcccgggggagcccgcagcccccggcgcccagcacttcttgtacgaggtgccgccctgggtcatgtgccgcttctacaaagtgatggacgccctggagcccgccg

SEQ ID NO: 44766 - DNA, 2300 bp, Homo sapien
tgtgcatcattccgggtaggacaagatgtgaacaggtccctcttctttgggcttaagtagaagttgtgctcttctgcttttacctgtgtgctcttctgcttttacctgttctcttctgcctttctcttgcaagaaacctgtcgaaagcttgctttgcatgccattgcttaaatactttgatggtatgtatggtatgtgggataactgagtgggagccggaattggggggtgggcagggcatccccacccccacccccacatcaaagggggaatgaccatttcgttagagaataaagcctgagtcttataacttcttcaagcacatgtatgctgggtctcctggcgtgtgaatgtgttcccgctgtgctgtgtggctgttttgcagttactgtagacactgtagtctgggctctcattattgcctctgaagttgacaggaccaagccttagtaaggatgcacttgtcttcctagcccaagagctaggggtgttttatatatatattaactttcttttttagatttcataaactgctctcattttctcttttctttctttctttttttttttttttttttgagacagtctcactctgtcacccatgctggagtgcagtggcacgatctcagctcactgcaacctctgcctcccgggctcaagcagttctctgcctcagcctcccaagtagctgggattacaggcacctgccaccacgcctggctaatttttgtattttttttttttttttttttttttttttagtcgagacggggtttcaccatcttggccacgctggtcttgaactcctgacctcgtgatccacccgcttcagcctcccaaagtgcagggattacaggcgtgagccaccgcacccagcctctggctcttttctttttgacatgaaatcttaagttaattatcttaaactttaagaactagaaggattcttagtccagcaccatcagtttacaaacaaaaaaaacttgtgtccctgagaagttgtgacttttccagggcctcctagccaggataccagtttggtttttattatatagctagccgagtaatactattaacttgacttctgggatttcaaagtattctatgacttgactgtttaagggaattatgaggcctcactgaacctcaaaagataattttaggtaccatcctggtagctgtagagcagcaacagaccagtaaaagacttggttggtgttgcccttcttctgggtttgattacatgagtaattgtgtgaatagtctctaagttgtatgctctgagctttcgtttttagcttataaaagtgctactcttgggccagcatagtatcagaaattagctaattcatatggggcagtttaggctttaactaggaaatgatggttatcttaatgacaaaaaaggtactgacaaaagtccttttttgaacatgtgttcaaaagaaaaagagaaactatcaaactaataactgagtttgttgaacatcgagattgactgatctgagaggcttaaaactgattgccctgaaatagacttgcatgttttggatgatggctttgggtctcccagagcacttggtttcccttggtgctgattttttctctcaggattaaagcccctttatgtgatgttgttacagcagcttattgcaacttcattcagctgcttgaaaaagaagggagactgcctctaggttccatgtgttctttcagggatggtattttgatgttgcgtattctcttgaacatgtattcttccctgagaatttctgtgtgccgtggtagaagaaatacttgccagaaatcgccactcatggtatgcttttgtagtgtcgaagtgtcccctagaggtgacaaggcttgtgatagtgttgattctaacaagcatgaatctttcctttattttagcactgtgtgttacgtgccagtaatttgcagcttatcctttgtttctagctaggtaagctgggaaatagcctagtactttgtctatgtgtttatcttcaaaatgtcccaaatagccctgggaaaaaggtcgtgcagctcaatgggggctttcaacttacaattttctttgttttaggctccataaaaatacagactcaccagttcctgctttgatgtgacatgtgactccccagaatacaccttgcttctgtagaccagctccaacaggattccatggtagctgggatgttagggctcaggtaagtaaccttcctttttttttttttagtatatgtcctggtttggccatctgttttttttttttttaaaaaaaaaaaaaaaaggaaaag

SEQ ID NO: 44767 - DNA, 2300 bp, Homo sapien
aagcagaactcttgatctgcacctctgaaaatgtacttttcctgtagttctccccactatggtgaaaagcacccttatttccccagttgctcaggccccaatctcaggaatcatccttgtttcttcccttgctctatgccctacatccaatccttttgttcagttctgaaaacatatcttgaatctcacaacttctcagagctgcactgctgccaccctagttaaagctaccatcaactctttctcctagactgttccagggccttgcaactagccttgtgctgtagttttgtttcatcacgtccagttctccactctacacctgcaacatagatcagacagctcctggctcaaaatcctctgagggcttctcatcttagaataaactctcggttctggccgggtgcggtggcttacgcctgtagtcccagcactttgggagtccgaggcgggcggatcacttgaactcaggagtttgagaccagcctgggcaacatggtgaactcccatctctatcaaaaatacaaaaacttagccaggcgtggtggttcgcatctgtggtcccagctacttaggacgctgaggagggaggatcgcttgagctcagggtggacgttgcagtgagccaagattgcgccactgcactgcagcctgggtgacagaatgagaccccatccccaccccccccaaaaaagaatgaactcccagttctcatagtggccccagctgcctttccaatcacattccctaccactctccagcaacactgacttcctcgttagtccccaacatgccaggcatagtctctcctcatgtcctttgaacttgcctggaatgttctttccccagatattcatatgagggagtaaaatgagggtgaaaaccagcagatatctaaatagcacccccttcacttagtttatctttctcaaagcccttatcactatgtgaaatgatatattatacttatttgtatgctagtatgaatcttcccggcaagaatgttagtttgctgtctgttcagtaccgtgcatccagagcctggaagagtgcctggcacatagcaggtagtcaataaatgaatgggggcaagcagccaaatcagaatcaggttttcttgctaagcatagaactaacagaaggatcattgaatggattggataatgactggcatcagggtaaggtccccttaacaaacactcctgtcctgaacacctggttagctaacagttttctcatactcttattttcccaaaacacaattgctggatctcagctccaaatcaactcttctaggaaagtgaaaaattgctggatctcagctcccaaatcatatcttccaggcagagctaacattgccccttattcacacctccaccaaaccatctgatccaacagtgacaggtgtcacgaggccttggcatgcactctcttcccccgccagagttctgcgaaagccagggttgcgatttgttgtcagtttattccccgcctctatgagagtgtgagcactgggcaggctcggatgaaataatgcattgagtaggcctctgaaaccaaggcccctcagctggggcaacgtcaggctccagggtgggcaactttgctgcttctgccgaagatagtgatattgagaaaatgtgggtgcaatgaaacgcttattgcagcgcactcggtgcatctgtggacagagggtcaatcgcccctcagagcagcgcaaacaggcgtcccaagcctaggccttcacttgccccagcatccgcaagggtccattaatccttaacattcaaattccgcccactaaaccagtccctccgcgcccaagccgcctcttttccccaaacgacggccgaaagcagccaatcaacagctggaggggtccgcccccttttccctggccgaaatggacaggaaatctcgccaattgacggcatcgccgctgagacctcccccctcccccgtcctccccgtcccagcccggccatcacagccaatgacgggcgggctcgcagcggcgccgagggcggggcgcgggcgcgcaggtgcagcagcgcgcgggccggccaagagggcggggcgcgacgtcggccgtgcggggtcccggcgtcggcggcgcgcgcgctccctcctctcggagagagggctgtggtaaaagccgtccggaaaatggccgccgccgccgccgccgcgccgagcggaggaggaggaggaggcgaggaggagagactgtgagtgggaccgccgtggccgcgggcggggacccttgccggggggcgggggtcaggggcgggacgtggcgc

SEQ ID NO: 44768 - DNA, 2300 bp, Homo sapien
tattttttgtagagacagggtctcactatgttgcccaggctagtctcgaactcctgggctcaagtgatcctctcacctcggcctcccaaagaactgggattacaggcatgagctaccatgtccagcccaattgcccattgatgggcacgggttgcttccatgtttcagctgttgtgaatcacgctgctgtgaacatgcgtgtgcaaacagcccttccagaccctgccttccattcctctgggcctatacccagcagtgcggttgctgggtcctatgggaattctacgtttaacttttggaggagctgccaaactgttttccacagtggctgcgccatcacaatccaattttaggacatttttatcacccataaagcactccctgtacccattaagaagtcatcctccatttccctccctcccctgtcctggcacccattcctctgctttgtgtgtctctggattgccctatctaagcatttcacagagatggagccatgcgctccgtggtcttttgtgtctggcttcgctcactgagcatgctgttctccaggtccatccacgttgtagcgtaggtcagcccttcattccctgttatggccaaatgatactccattgtacagacaggccactttttacccactcatctgcttctggacttttgggttgcttctaccatgtggcctgttgggaacagtgctctgtttgtattcatgtacgggtttttgtgtggacacacattttcaagtctcttgggtacacaggtgtagaagtgccagagttggggaaaaagctcacctttctaggctgtgaatgggccctggcaagtctgtggccaggactcgtcttctcttccacatggggcccctagcttggcacctagcacgtggcaggcagcgacagatgttaaaagccattcttgctatgggtagccaggctggggctccatgcagccctggccttcagcttggcagccagggcccccttgtgcctgcagcagaagccatgctgccaggagtgtaagtgtgagccaggaatgctggagaatcgtggctctgagaacagggacaagaggccacaagctcacgccttggctttcctaagcttaaggaataaacccaaaaggaggtacctggaaggagctggatttggggactgaggagctgggagctgatggaagccgtgaaaggggatgtgctcctggggaggcgctggggcgggtgggccgtggaggggacagggcccgttggttggaaactgaggcgaggctacggagttgggcactaacaggtcatccgtgcccctgcgaagcgtggggacacagggacagcagagatggcctgtctggacactctgtcgacggggggcctgtggttggtgaagcccaaggcaaggctgtgaactcagggcaagggagacgtgagcaggcgctgccgtgggctgatgtgggcactgcatgtgcaccctggcggccaaaggacctacagctcatggggggcaagggggaggagggaagccaacagcaggatgtgcgcagtcagtctgccccccctacactggaggaggagccccccggcacaaatctcgcccgtttgggcccacggacatggctggcctcgcaaggaggatccggttccaggcctcggccctaaatagtctccctgggctttcaagagaaccacatgagaaaggaggattcgggctctgagcagtttcaccacccaccccccagtctgcaaatcctgacccgtgggtccacctgccccaaaggcggacgcaggacagtagaagggaacagagaacacataaacacagagagggccacagcggctcccacagtcaccgccaccttcctggcggggatgggtggggcgtctgagtttggttcccagcaaatccctctgagccgcccttgcgggctcgcctcaggagcaggggagcaagaggtgggaggaggaggtctaagtcccaggcccaattaagagatcaggtagtgtagggtttgggagcttttaaggtgaagaggcccgggctgatcccacaggccagtataaagcgccgtgaccctcaggtgatgcgccagggccggctgccgtcggggacagggctttccatagccatggcccagcagtggagcctccaaaggctcgcaggccgccatccgcaggacagctatgaggacagcacccagtccagcatcttcacctacaccaacagcaactccaccagaggtgagccagcaggcccgtggaggctgggtggctgcactgggggccaccggccacccacctgccccgccca

SEQ ID NO: 44769 - DNA, 2300 bp, Homo sapien
ctgaggtcaggagttcccgaccagcctgactaacatggtgaaaccccgtttctactaaataaaaaacaattagctgggcttagtggcaaatacctgtactcccagctacttgggaggctgagacaggagaatcgcttgtacctgggaggtcgaggttgcggtgagccaagatcgagccattgcactccagcctgggcaacaagagcaaaactctgtctcaagaaaaaaaatttaacaggccacctaattgcgattaaaaaaaaaccaaaaccctgaatctgtttagattcccacttgcagggtatgtgacatcaccttctgccacattctcgccagccctggacattgttaggctttttaatttttggcgttctggtggatgagaaaatagtatttaattgttgcttttcgcttactattcccggatcaccttgcaattacatgttttattatacgtttactgtcttttgtttttcgtcgtctgagatgtccgtggctaccctttaatgtctttatattgggttatttgctcttagtttactgatttgcagttctttatatattgtgttgattagccctttatctatcagatatgtttcaagcctttttttttcttgtttgcttttatttatttattttttgagatggggtctcagtctgccaccctggctggagggcagtggtgcgatcacggcagcctcgacatccccgggatcaagcgatcctcccgtctcagcgtcctgggtagctgggactacaggtgtgtaccaccactccaggataattgttgtattaattttttttttaatagagacggggtttcgccatgttgcccaggctggtcttgacctcctgagctcaagagatccacccaccttggcttccaaagtgctgggattacaggcatgagccagcacacccagcccttgttttattttctccccctttctttctttcttttttgtttttgttttgattaatcaagtcccatttttttctcctcttggttatttggatgttatgtacatatgtagcttcttttctagtgattactttttttttttttttgagacaatctcactcttgtcagtcaggctggagtgcagtggcgcagtctcggctcactgcaacctccgtctccccggctcaagcaattctcctgcctcagcctccccagtagctgggattacaggtgtgtgccaccatgcccggctaatttttgtatttttagtagggacagtgtttcgcagtgttgaccatgatggtctcaaactcctgacctcaagtgatccacccgccttggcttcccaaagtgctgggattacagctgtgagccaccacgcccggcccggcccccccccccccgctcttttttttttgagacaaggtctcactctgtcacccaggttggagggcagtagcacagtcacaggtcactgcagcctctacttgctgggcacaagtaatcctcctgcctcagcatcctgagtagctgggaccacaggtgcacaccactgccctggcaagacttgctttttaaacagttgttgaattcttacatttgtcagtggtgtactgaactccttcatgtctaaaaatgtctttagtctaaccccacagttgacagttggggtgtagaattttaggctgggaaatcatttttccctcagaatttcgaaagcagcacttcattgtcttttttttttttttttttttttttttttgggacagagtcttgctctgtcgcccaggctggagtacaggggagtgatcctcggctcactgcaacctcttgggttcaagcgattctcttgcctcagcctcccgagtagctgggattacaggcgcccaccacaatgctggctaatttttgtatttttagtagagacagagtttcctcatgttggccagcctggtctcaaactcttgacttcaagtgatccgcctgcctgggcttcccagagtgctgagattacaggtgtgagccaccgtgcccggccagcacttcattgtcttctagttccccatgctgttgctgaagtctgaagccattctgacttctgattctttgaatgtgacctatttttttctctctgacagttattctctcagtgtatcgaagatatcagtcaactatcttctggattgcattgatgctattgagaaggcagcctgccgtctaaaagtcatggttttaaaggtaatcagctttttttcctctggctgcttttaacatcttgtgtcggccgcgggcggtggctcatgcttgtaatcccagcactttgggaggcccaggtggg

SEQ ID NO: 44770 - DNA, 2300 bp, Homo sapien
gagggaaaaatgatttcccagcctaaaattctacaccccaactgtcaactgtggggttagactaaagacatttttagacatgaaggagttcagtacaccactgacaaatgtaagaattcaacaactgtttaaaaagcaagtcttgccagggcagtggtgtgcacctgtggtcccagctactcaggatgctgaggcaggaggattacttgtgcccagcaagtagaggctgcagtgacctgtgactgtgctactgccctccaacctgggtgacagagtgagaccttgtctcaaaaaaaaaagagcgggggggggggggccgggccgggcgtggtggctcacagctgtaatcccagcactttgggaagccaaggcgggtggatcacttgaggtcaggagtttgagaccatcatggtcaacactgcgaaacactgtccctactaaaaatacaaaaattagccgggcatggtggcacacacctgtaatcccagctactggggaggctgaggcaggagaattgcttgagccggggagacggaggttgcagtgagccgagactgcgccactgcactccagcctgactgacaagagtgagattgtctcaaaaaaaaaaaaaaagtaatcactagaaaagaagctacatatgtacataacatccaaataaccaagaggagaaaaaaatgggacttgattaatcaaaacaaaaacaaaaaagaaagaaagaaagggggagaaaataaaacaagggctgggtgtgctggctcatgcctgtaatcccagcactttggaagccaaggtgggtggatctcttgagctcaggaggtcaagaccagcctgggcaacatggcgaaaccccgtctctattaaaaaaaaaattaatacaacaattatcctggagtggtggtacacacctgtagtcccagctacccaggacgctgagacgggaggatcgcttgatcccggggatgtcgaggctgccgtgatcgcaccactgccctccagccagggtggcagactgagaccccatctcaaaaaataaataaataaaagcaaacaagaaaaaaaaaggcttgaaacatatctgatagataaagggctaatcaacacaatatataaagaactgcaaatcagtaaactaagagcaaataacccaatataaagacattaaagggtagccacggacatctcagacgacgaaaaacaaaagacagtaaacgtataataaaacatgtaattgcaaggtgatccgggaatagtaagcgaaaagcaacaattaaatactattttctcatccaccagaacgccaaaaattaaaaagcctaacaatgtccagggctggcgagaatgtggcagaaggtgatgtcacataccctgcaagtgggaatctaaacagattcagggttttggtttttttttaatcgcaattaggtggcctgttaaattttttttcttgagacagagttttgctcttgttgcccaggctggagtgcaatggctcgatcttggctcaccgcaacctcgacctcccaggtacaagcgattctcctgtctcagcctcccaagtagctgggagtacaggtatttgccactaagcccagctaattgttttttatttagtagaaacggggtttcaccatgttagtcaggctggtcgggaactcctgacctcaggagatctacccgccttggcctcccaaagtgctgggattacaggcgtgtgccactgtgcccagccacttttttttagacagagtcttggtctgttgcccaggctagagttcagtggcgccatctcagctcactgcaacctccgcctcccagattcaagcgattctcctgcctcgacctcccagtagctgggattacaggtttccagcaaatccctctgagccgcccccgggggctcgcctcaggagcaaggaagcaaggggtgggaggaggaggtctaagtcccaggcccaattaagagatcagatggtgtaggatttgggagcttttaaggtgaagaggcccgggctgatcccactggccggtataaagcaccgtgaccctcaggtgacgcaccagggccggctgccgtcggggacagggctttccatagccatggcccagcagtggagcctccaaaggctcgcaggccgccatccgcaggacagctatgaggacagcacccagtccagcatcttcacctacaccaacagcaactccaccagaggtgagccagcaggcccgtggaggctgggtggctgcactgggggccaccggccacccacctgccccgcccaagggaatctctcttctgc

SEQ ID NO: 44771 - DNA, 2300 bp, Homo sapien
ctcctgaggtcaggagttcccgaccagcctgactaacatggtgaaaccccgtttctactaaataaaaaacaattagctgggcttagtggcaaatacctgtactcccagctacttgggaggctgagacaggagaatcgcttgtacctgggaggtcgaggttgcggtgagccaagatcgagccattgcactccagcctgggcaacaagagcaaaactctgtctcaagaaaaaaaatttaacaggccacctaattgcgattaaaaaaaaacaaaaccctgaatctgtttagattcccacttgcagggtatgtgacatcaccttctgccacattctcgccagccctggacattgttaggctttttaatttttggcgttctggtggatgagaaaatagtatttaattgttgcttttcgcttactattcccggatcaccttgcaattacatgttttattatacgttactgtcttttgtttttcgtcgtctgagatgtccgtggctaccctttaatgtctttatattgggttatttgctcttagtttactgatttgcagttctttatatattgtgttgattagccctttatctatcagatatgtttcaagcctttttttttcttgtttgcttttatttatttattttttgagatggggtctcagtctgccaccctggctggagggcagtggtgcgatcacggcagcctcgacatccccgggatcaagcgatcctcccgtctcagcgtcctgggtagctgggactacaggtgtgcaccaccactccaggataattgttgtattaatttttttttaatagagacggggtttcgccatgttgcccaggctggtcttgacctcctgggctcaagagatccacccaccttggcttccaaagtgctgggattacaggcatgagccagcacacccagcccttgtttttttttttttctccccctttctttctttcttttttgtttttgttttgattaatcaagtcccatttttttctcctcttggttatttggatgttatgtacatatgtagcttcttttctagtgattacttttttttttttttttgagacaatctcactcttgtcagtcaggctggagtgcagtggcgcagtctcggctcactgcaacctccgtctccccggctcaagcaattctcctgcctcagcctccccagtagctgggattacaggtgtgtgccaccatgcccggctaatttttgtatttttagtagggacagtgtttcgcagtgttgaccatgatggtctcaaactcctgacctcaagtgatccacccgccttggcttcccaaagtgctgggattacagctgtgagccaccacgcccggcccccccaccccccgctcttttttttttgagacaaggtctcactctgtcacccaggttggagggcagtagcacagtcacaggtcactgcagcctctacttgctgggcacaagtaatcctcctgcctcagcatcctgagtagctgggaccacaggtgcacaccactgccctggcaagacttgctttttaaacagttgttgaattcttacatttgtcagtggtgtactgaactccttcatgtctaaaaatgtctttagtctaaccccacagttgacagttggggtgtagaattttaggctgggaaatcatttttccctcagaatttcgaaagcagcacttcattgtctttttttttttttttttttttttttttgggacagagtcttgctctgtcgcccaggctggagtacaggggagtgatcctcggctcactgcaacctcttgggttcaagcgattctcttgcctcagcctcccgagtagctgggattacaggcgcccaccacaatgctggctaatttttgtatttttagtagagacagagtttcctcatgttggccagcctggtctcaaactcttgacttcaagtgatccgcctgcctgggcttcccagagtgctgagattacaggtgtgagccaccgtgcccggccagcacttcattgtcttctagttccccatgctgttgctgaagtctgaagccattctgacttctgattctttgaatgtgacctatttttttctctctgacagttattctctcagtgtatcgaagatatcagtcaactatcttctggattgcattgatgctattgagaaggcagcctgcagtctaaaagtcatggttttaaaggtaatcagctttttttcctctggctgcttttaacatcttgtgtcggccgcgggcggtggctcatgcttgtaatcccagcactttgggaggcccaggtggg

SEQ ID NO: 44772 - DNA, 2300 bp, Homo sapien
ctgagggaaaaatgatttcccagcctaaaattctacaccccaactgtcaactgtggggttagactaaagacatttttagacatgaaggagttcagtacaccactgacaaatgtaagaattcaacaactgtttaaaaagcaagtcttgccagggcagtggtgtgcacctgtggtcccagctactcaggatgctgaggcaggaggattacttgtgcccagcaagtagaggctgcagtgacctgtgactgtgctactgccctccaacctgggtgacagagtgagaccttgtctcaaaaaaaaaagagcggggggtgggggggccgggcgtggtggctcacagctgtaatcccagcactttgggaagccaaggcgggtggatcacttgaggtcaggagtttgagaccatcatggtcaacactgcgaaacactgtccctactaaaaatacaaaaattagccgggcatggtggcacacacctgtaatcccagctactggggaggctgaggcaggagaattgcttgagccggggagacggaggttgcagtgagccgagactgcgccactgcactccagcctgactgacaagagtgagattgtctcaaaaaaaaaaaaaaaagtaatcactagaaaagaagctacatatgtacataacatccaaataaccaagaggagaaaaaaatgggacttgattaatcaaaacaaaaacaaaaaagaaagaaagaaagggggagaaaaaaaaaaaaacaagggctgggtgtgctggctcatgcctgtaatcccagcactttggaagccaaggtgggtggatctcttgagcccaggaggtcaagaccagcctgggcaacatggcgaaaccccgtctctattaaaaaaaaattaatacaacaattatcctggagtggtggtgcacacctgtagtcccagctacccaggacgctgagacgggaggatcgcttgatcccggggatgtcgaggctgccgtgatcgcaccactgccctccagccagggtggcagactgagaccccatctcaaaaaataaataaataaaagcaaacaagaaaaaaaaaggcttgaaacatatctgatagataaagggctaatcaacacaatatataaagaactgcaaatcagtaaactaagagcaaataacccaatataaagacattaaagggtagccacggacatctcagacgacgaaaaacaaaagacagtaacgtataataaaacatgtaattgcaaggtgatccgggaatagtaagcgaaaagcaacaattaaatactattttctcatccaccagaacgccaaaaattaaaaagcctaacaatgtccagggctggcgagaatgtggcagaaggtgatgtcacataccctgcaagtgggaatctaaacagattcagggttttgtttttttttaatcgcaattaggtggcctgttaaattttttttcttgagacagagttttgctcttgttgcccaggctggagtgcaatggctcgatcttggctcaccgcaacctcgacctcccaggtacaagcgattctcctgtctcagcctcccaagtagctgggagtacaggtatttgccactaagcccagctaattgttttttatttagtagaaacggggtttcaccatgttagtcaggctggtcgggaactcctgacctcaggagatctacccgccttggcctcccaaagtgctgggattacaggcgtgtgccactgtgcccagccacttttttttagacagagtcttggtctgttgcccaggctagagttcagtggcgccatctcagctcactgcaacctccgcctcccagattcaagcgattctcctgcctcgacctcccagtagctgggattacaggtttccagcaaatccctctgagccgcccccgggggctcgcctcaggagcaaggaagcaaggggtgggaggaggaggtctaagtcccaggcccaattaagagatcagatggtgtaggatttgggagcttttaaggtgaagaggcccgggctgatcccactggccggtataaagcaccgtgaccctcaggtgacgcaccagggccggctgccgtcggggacagggctttccatagccatggcccagcagtggagcctccaaaggctcgcaggccgccatccgcaggacagctatgaggacagcacccagtccagcatcttcacctacaccaacagcaactccaccagaggtgagccagcaggcccgtggaggctgggtggctgcactgggggccaccggccacccacctgccccgcccaagggaatctctcttctgc

SEQ ID NO: 44773 - DNA, 2300 bp, Homo sapien
aaaaaaggcttgaaacatatctgatagataaagggctaatcaacacaatatataaagaactgcaaatcagtaaactaagagcaaataacccaatataaagacattaaagggtagccacggacatctcagacgacgaaaaacaaaagacagtaaacgtataataaaacatgtaattgcaaggtgatccgggaatagtaagcgaaaagcaacaattaaatactattttctcatccaccagaacgccaaaaattaaaaagcctaacaatgtccagggctggcgagaatgtggcagaaggtgatgtcacataccctgcaagtgggaatctaaacagattcagggttttggtttttttttaatcgcaattaggtggcctgttaaattttttttcttgagacagagttttgctcttgttgcccaggctggagtgcaatggctcgatcttggctcaccgcaacctcgacctcccaggtacaagcgattctcctgtctcagcctcccaagtagctgggagtacaggtatgtgccactacacccagctaatttttttgtatttagtagaaacggggtgtctccatgttaggctggtcaggaactcctgacctcaggtgatccacccaccttggcctcccaaagtgctgggattacaggagcgtgtgccactgtgcccagccactttttttttttttttagacggagtcttgctctgtcgcccaggctggagtacagtggcgccatctcagctcactgcaacctcgcttcccggattcaagtgattctcctgcctcagattcccattagctgggattacaggtgcccaccaccgcctggcatggtggctcacacctgtaatcccaacactttgggaggccgaggtgggcagatcacctgaggtcaggagttcgagaccaacctggccaacatggtgaaaacccgtctctactaaaaatacaaaaaattagccaggtgtggtggcggatgcctgtaatcccagctattcaggaggctgaggcaggagaatcgcttgaagccaggaggcagaggttgcaacgagctaagttcgagccactgcactccagcttgggcgacagggcgagactccgtctcaaaaaaaaaaaaaatgtaaacacacattccctttaacccagcagaacatgggaacccaagggcattcagcctgtggcgcgaccaggcggcctgacttgagctcacgtagaaattcggcatttttgaaccaagagacagcacttgggatccggaatgtctggacttgggcacggcgctgtggagctggcgccgttgggagccatgcgagttctgggtcggtaggtcacctcagaggtggggagaaggttctctgagaccgacatgggggctagtgctggcaccaccggacatggggcatttcagacacagggcgagcacattccctagttaccagggttcattcgagtcagtcacgtcacaggctggcaatgggctaactcctcctcaacaatcacacggggcttgcctcatagaatgttttaaaaaaggaaaggaggctggcgcaggcgccaaccgtctcagaaccctgagcactgccccacccccaccctgcccgccatagcctgggctgttgtgggggaggggtgaccatttatcacgaaacaaaaaattgcgccacagcagctccctccctcccccacctttacggttgcagctgcacgtcccacgtgcagcaccaccccctgacacgtgcggcaccaccccctgacacgtgcggcaccaccccctgacacgtgcggcaccaccccctgacacgtgcggcaccaccccctgacacgtgcggcaccacacagctagtgccggaactttttgtgcagagaaagaagaccctgcacccgcgcggagggagcccttttgagattgcaggagagaagatgagaatgggactattttcaataactgtgcacatgcaagtcacaaacattccagatcccttgacttgcttgcggagggagcggccggcggagggagcggcaggtggagggagtggcacgaggcatgcggagggagctgcaccgacatcacataaacgcactgggcagctcgcaggcgccattcgctcttcagacgccggagacgtaggagtgggtcttcagactccaaaggggttggactaatggcggatgctgaggcgagggctgagttcccggaggaggccagacctgacaggggcaccttgcaggtgttgcaagatatggccagccgcttgcgaatccattccatcagggccacatgctccacgagctccgggtaa

SEQ ID NO: 44774 - DNA, 2300 bp, Homo sapien
ttcaacagctcatttttgttccaattcgtactcaattcccggtttcttttactttatttttttagagacagggtctcactgtttgccaagctgaatgcgaactcctgggctcaagcgatcctccctcctcaggccccacgtactgagactgcaggcgtgagccaccgccctcagctgggtttaacttttttttctttgaggcacggtctcgctcttgcccaggctggagtgcggtggcgcaatctcagttcactgtaacctgagcctctcagcctcccgcgtagctgggactacaggcacgtgccaccacgcccagctaatttttgtaacattttgtacagaggttcgccatcttgcccaggctgatctcgaactagtttctaggctcacacgatccgtctgcctcggcctcccaaagtgcttgggattacaggtggcagccactacacccagccactccaaaaaatttaagatggaacactttgaaacatcctatgaagccagcattacactttgataccaaaaccaaatactacaatacaactagagaccaatatccctcaaactgatgcaaaaaccatcaactgcataccagcaaacccaacagcacaagcaagcctcccgaatagctgggagtgcaggtgtgcgcccccatgcccgactcattttttatttttattttttggtaagagacggggtttcgccatgttgcccaggctggaattttaattgctttttatcctcacatcctgggttagagtcgctcattcaccctcgggatccagtacaactgcttaccagggaagccctgctccccgctaaaatgaaaaccacagctagcccaatctgatcccagtgacattctcccgccacctcagtccagtctggatcctttgtctcccaactggagatcttggcgacctccagaactttggccgtgggtaaattgaggggcgggctccagaacccgcggctgaccaaccaaccgaccgacccttgggttggcgggaatagtgcctcgctgccatctagggtgctcgaccgggccccaacagcccaagacagggcattacgacacagcccattgtgcctctgaaggctctcccttcaccacacggcctcatggccaccaggcctgaagccaccgggcccgtggccctgcatgacccagacttcaatgaggagaacttacccggagctcgtggagcatgtggccctgatggaatggattcgcaagcggctggccatatcttgcaacacctgcaaggtgcccctgtcaggtctggcctcctccgggaactcagccctcgcctcagcatccgccattagtccaacccctttggagtctgaagacccactcctacgtctccggcgtctgaagagcgaatggcgcctgcgagctgcccagtgcgtttatgtgatgtcggtgcagctccctccgcatgcctcgtgccactccctccacctgccgctccctccgccggccgctccctccgcaagcaagtcaagggatctggaatgtttgtgacttgcatgtgcacagttattgaaaatagtcccattctcatcttctctcctgcaatctcaaaagggctccctccgcgcgggtgcagggtcttctttctctgcacaaaaagttccggcactagctgtgtggtgccgcacgtgtcagggggtggtgccgcacgtgtcagggggtggtgccgcacgtgtcagggggtggtgccgcacgtgtcagggggtggtgccgcacgtgtcagggggtggtgctgcacgtgggacgtgcagctgcaaccgtaaaggtgggggagggagggagctgctgtggcgcaattttttgtttcgtgataaatggtcacccctcccccacaacagcccaggctatggcgggcagggtgggggtggggcagtgctcagggttctgagacggttggcgcctgcgccagcctcctttccttttttaaaacattctatgaggcaagccccgtgtgattgttgaggaggagttagcccattgccagcctgtgacgtgactgactcgaatgaaccctggtaactagggaatgtgctcgccctgtgtctgaaatgccccatgtccggtggtgccagcactagcccccatgtcggtctcagagaaccttctccccacctctgaggtgacctaccgacccagaactcgcatggctcccaacggcgccagctccacagcgccgtgcccaagtccagacattccggatcccaagtgctgtctcttggttcaaaaatgccgaatttctacgtgagctcaagtcaggccgcct

SEQ ID NO: 44775 - DNA, 2300 bp, Homo sapien
ctgcactccagcctgggcgacagtgatacttcgtctcaaaacaaaaaaagaaaaaaaaaacaaaaaaaacctgtagaccaatatcccttatactgatgcaaaaaccatcaaccgcatactagcaaattcaacagctcatttttgttccaattcgtactcaattcccggtttcttttactttatttttttagagacagggtctcactgtttgccaagctgaatgcgaactcctgggctcaagcgatcctccctcctcaggccccacgtactgagactgcaggcgtgagccaccgccctcagctgggtttaacttttttttctttgaggcacggtctcgctcttgcccaggctggagtgcggtggcgcaatctcagttcactgtaacctgagcctctcagcctcccgcgtagctgggactacaggcacgtgccaccacgcccagctaatttttgtaacattttgtacagaggttcgccatcttgcccaggctgatctcgaactagtttctaggctcacacgatccgtctgcctcggcctcccaaagtgcttgggattacaggtggcagccactacacccagccactccaaaaaatttaagatggaacactttgaaacatcctatgaagccagcattacactttgataccaaaaccaaatactacaatacaactagagaccaatatccctcaaactgatgcaaaaaccatcaactgcataccagcaaacccaacagcacaagcaagcctcccgaatagctgggagtgcaggtgtgcgcccccatgcccgactcattttttatttttattttttggtaagagacggggtttcgccatgttgcccaggctggaattttaattgctttttatcctcacatcctgggttagagtcgctcattcaccctcgggatccagtacaactgcttaccagggaagccctgctccccgctaaaatgaaaaccacagctagcccaatctgatcccagtgacattctcccgccacctcagtccagtctggatcctttgtctcccaactggagatcttggcgacctccagaactttggccgtgggtaaattgaggggcgggctccagaacccgcggctgaccaaccaaccgaccgacccttgggttggcgggaatagtgcctcgctgccatctagggtgctcgaccgggccccaacagcccaagacagggcattacgacacagcccattgtgcctctgaaggctctcccttcaccacacggcctcatggccaccaggcctgaagccaccgggcccgtggccctgcatgacccagacttcaatgaggagaacttacccggagctcgtggagcatgtggccctgatggaatggattcgcaagcggctggccatatcttgcaacacctgcaaggtgcccctgtcaggtctggcctcctccgggaactcagccctcgcctcagcatccgccattagtccaacccctttggagtctgaagacccactcctacgtctccggcgtctgaagagcgaatggcgcctgcgagctgcccagtgcgtttatgtgatgtcggtgcagctccctccgcatgcctcgtgccactccctccacctgccgctccctccgccggccgctccctccgcaagcaagtcaagggatctggaatgtttgtgacttgcatgtgcacagttattgaaaatagtcccattctcatcttctctcctgcaatctcaaaagggctccctccgcgcgggtgcagggtcttctttctctgcacaaaaagttccggcactagctgtgtggtgccgcacgtgtcagggggtggtgccgcacgtgtcagggggtggtgccgcacgtgtcagggggtggtgccgcacgtgtcagggggtggtgccgcacgtgtcagggggtggtgctgcacgtgggacgtgcagctgcaaccgtaaaggtgggggagggagggagctgctgtggcgcaattttttgtttcgtgataaatggtcacccctcccccacaacagcccaggctatggcgggcagggtgggggtggggcagtgctcagggttctgagacggttggcgcctgcgccagcctcctttccttttttaaaacattctatgaggcaagccccgtgtgattgttgaggaggagttagcccattgccagcctgtgacgtgactgactcgaatgaaccctggtaactagggaatgtgctcgccctgtgtctgaaatgccccatgtccggtggtgccagcactagcccccatgtcggtctcagagaaccttctccccacctctgaggtgacctaccgacccaga

SEQ ID NO: 44776 - DNA, 2300 bp, Homo sapien
caacgtctgttgttggaaattcattgtttgcttttctaaaccatggctccatttatgccctaggggatgtgcttcattcggaccacccgaccagaaactatggttatttacaccccacaagaacgctttgagatcggacaggccaaggtaagggcttacgcgctcctgcgttattcagtatcatctcctgtaaaaagaacacttctgaatctatcaccagctatcttcagagttgagacatcatcctttctttgctctcatttttttaaaaaacagttgtgacctttacctgcttttccttgggaaggaacattctatgaatttcagcttagcctgaacttttctgctttccaaatggagtcttttgttgttgttgagttcaaagatagtaacatgaagccacttgagcggtcgtggctataatttatcttggccgcaagctaaacaaaacagaagccagcgctttgggaggccaaggcgggaagattgcttgaggccaggaattccagagcagcctgggaaacatagcgagattcccatctttacaaaaattttttaaactagccgggtgtggtggcatccacctgtggtctcagctactcaggaggctgaggaaggaggatagaggagcgcaggaattcaaggcagcagtgagctatgatggatcacaccactgtactccagcctgggtgacaagagtaagaccctatctctaaaaacaagacaaaaaataatagaaatcacttgaaatgaataatctgttaggttcagattttacagatctaaggccaggaataaaagggaacatgatctctggtattctcacaaaagccctgagaagttcagattatcagtcctatctgtagatgaggattggagaaagtaagtgtcttacttaagggtttacagcttgtgagtaccaagaccagaatccaggcctgagtagtgagcccagtctccccaggtctgcccaccacgctgaccatcccctgctcagcctgcctgtcagggccatgcatagagaaaagcagaaacgtctatggagaaaataagtgactctgctcatcacctagggagtggggcttgtagacattttggcatgcttccttcctgtctttgttctaggcatacatgtatattttacacagttgagatcatactgaatagaaaggtttgcccatagccactcttgaaagagcagcaggtaacatccaatttggttgctaaggactaggctgctccagaattcacagttgcaagtactcagaatggccagagtgctgccataaagcaggtgtttccagaactgtccactgtgtgccataacgtagctggaaaacgccaccaaatggaaaagttagtgttcacctttggtgttaactacaggttctgtttctatggggagggtctcttgacattcacatggtttgcagagcttgcttatttctgtcgtctcttttctaataattttcctgtcctgacaaaagcaagtaaatttactgatagtaaaggatgtgagataaatgtgtgtgataacatgcatggcatggatcgttaaagggctgggctttgaaaagaggacatggatatgtgtgcatgcgtgtataagtattttaagaggccaggacatccttaaagaatggggtggctcagaaaccctttctgtactatcagcaatggttcttaagctacagggaaacctatacagaggggaagtggagaataattccagatgcctccgatgggtagctttggaggcaacaatctatgaaagaagcccaggaactctgtctttgcttgcagaatagtacgttgtcgagagcgagggctttgatgtcagccccgcctggctgtgggtcccagccctgccctgggccacttcctcctgctctgagatttgctttcctcagctgcagaacggttgtgccactgaacagatcttacagggaggctgtgagggttctcagagttcaggcacacaagatcttagcactcagcgtgttgccaatgcccagaatgttctcattaacatgttagtcactggagtccaatctttgcatgccatagtgagctctcaaaccagactcctgatgggtatgtggcgtatccatgctccaggacagctggagcagtgtaatttcctatcaaaaagtatgtgtcctggcttgtaaatgcatctgatttttttagtagtgagttattaaggagtgaaattgttagaattgggggatagcggcatagcaaagtgccttccactttgacatgcattctgtgtgtagtaaccacggcattctgttttg

SEQ ID NO: 44777 - DNA, 2300 bp, Homo sapien
ggagccaggtactgggaacccggctggggttggaggaggtggggcctgagtgtgggtattggacccagggctggcacagatagccctgcctggcactcactcttcactttgaggtcacagggccacccaggctgttcgtgggaggtgggaggcccaaaggctgatgagccggtcttacactctttccctgcccaggtgactacgaagtctcagtcaagttcaacgaggaacacattcccgacagccccttcgtggtgcctgtggcttctccgtctggcgacgcccgccgcctcactgtttctagccttcaggtgaggcaccgagagaaaccgcccacctggggctcctgggcccggacagaccagagccaccgcagagaccaggccttggccctgtgttcagtgacccccctggcccagctctgggttccaggcctctgctctggccgggtgcagcccacgcttggggtcggcaggaaatatcctgcccaccacgtggagtttttctcgtgtctcaggtctaaaggctttgaacagaagcctgtgccccttgagcaccagggctgcggtttaaagagggacagcctgccaaggctgggtgctgcccacagggtggggcagccctcccttcctgccacctgggtgtgtgcgacggcagagtgtgggggcaggggcggggatgtgcgcctgtggcttgctgccccttgcaaatcagtggctctccctctttaaaccaagttggacgccagatgggtaagtgcgacccgcgggcctcttgctcctggggcctttccgtcctcccttgccctggctcaagcacccccatctaaccatgtctgctgtgcttccaggagtcagggctaaaggtcaaccagccagcctcttttgcagtcagcctgaacggggccaagggggcgatcgatgccaaggtgcacagcccctcaggagccctggaggagtgctatgtcacagaaattgaccaaggtgaggccctgtccctgcccggccgccctgccctgctggctggaagcaggctgagagtacaaaaggaaggtaccgcttctgtaagcagccaagacggggccccaactcctgggccccctaagccaggcaaccctttcccaattggtgacccaagccgctggggatgtggctcgccacccacagctattaggaaggccttctaccctgcagtaccatgccatctccacagggaaagactcaaagtccagcctcagtgctgcccggcccttcagccacggccatggtacttgtgcacaggcctggggcagccttgtgggtaggaggagcccagtgggcttcatttcacggcctagtcctgcccttcccagctgcatgacctgaagcaagttcctgcccgtctctgagcctgttaacatgcaggggatatggtgttcacggtaacctttcttaggaggcagcaaggcctgggtttggcttgtaaaagatttccgtcccaatgcaccctgacggtgggcagcttgagtgtctaaaccttcggccctcaggaggtctgctgcggggtgcaggtgcccagcgtggctgggctcacactgatggaccggcaaaatggggagggccagggttgaggctgttcctcacagacaccatctgctggtttgaggaggggccccaggcccacagcatgactccctgctcctcagataagtatgctgtgcgcttcatccctcgggagaatggcgtttacctgattgacgtcaagttcaacggcacccacatccctggaagccccttcaagatccgagttggggagcctgggcatggaggggacccaggcttggtgtctgcttacggagcaggtctggaaggcggtgtcacaggtaagtctgtcggtgcggctgcacgtgtgcacacagctgctaggcccttgcctccaagctcttggtgacaacaggaggcacctggaggtgacaagcctgtgctgggtggccgaggacagggaggcaggccagtctggctctgcctgacctcctgtgctcccagggaacccagctgagttcgtcgtgaacacgagcaatgcgggagctggtgccctgtcggtgaccattgacggcccctccaaggtgaagatggattgccaggagtgccctgagggctaccgcgtcacctatacccccatggcacctggcagctacctcatctccatcaagtacggcggcccctaccacattgggggcagccccttcaaggccaaagtcacaggtgagcctggggccaagctattggcatctgcccaacgcccggcaccacagccacctc

SEQ ID NO: 44778 - DNA, 2300 bp, Homo sapien
aacgtcactgtctctcccctttcctcgggcactctggggccctggagcctgctcagctgctctgccctcgcaacccagcagtggtggctgtagcttgggcctcctgttccctgtctccctgggtgctatccccgctctgccaagcctgctgcgctgcgctactcgggtgctaaccccgctgcctcccgcttccccgctcccactcctgtctgcaccgggctgcttttcaccgcgagccttctcagttgtcaggaaactccggtttcaccatcaggcctggggggtggggaggcaagtgtcacatccccccacgctgcagcaggactccgcctcaccgcgtccacacacagcaatgggggccggggccaggccagaagggcgcaggcagccgtgtgcccagccagatgctggcgttcagcagtgtgggccatggtgctggacgaggctgagtaggcaagggagtggctgtcaacacttaggctggagtgggcccttccttttcctcccaggcacctgggtgctactgtcgggcctctcccacatgggcacttgaggtggtcaggagaaaccttcctgccttctgagaaaccactcgccatcccagcttggaggggcagggcggggcaggaggcctggcggcctggctgtgcttggtggtggcaatgagaggcctgtgtgggcggcaggcggacgggaacaacctgaacccgagctcacacgctggcccccctttggggacccaccctgccccaccaggtgctggcatcggccccaccattcagattggggaggagacggtgatcactgtggacactaaggcggcaggcaaaggcaaagtgacgtgcaccgtgtgcacgcctgatggctcagaggtggatgtggacgtggtggagaatgaggacggcactttcgacatcttctacacggccccccagccgggcaaatacgtcatctgtgtgcgctttggtggcgagcacgtgcccaacagccccttccaagtgacggtgaggaggggtggggggtaggtcagcaggggtgtctggcaggtcccggcctgttcccctggggcccctctgtgacaacagactctccagcagctctctgctttgccctgcaggctctggctggggaccagccctcggtgcagccccctctacggtctcagcagctggccccacagtacacctacgcccagggcggccagcagacttgggtacggcctggccagctagggacactggggctagccagctgggtgttctgtgagcccctagtttaccatgtgtgaggagggaccccagatcctcccactgtccctcacccatgccctgtgtctccactgcaggccccggagaggcccctggtgggtgtcaatgggctggatgtgaccagcctgaggccctttgaccttgtcatccccttcaccatcaagaagggcgagatcacaggtgagtggggacttgggaaggagctcgggagccaaggaggccagactgtgccaatgagctgccctgacctcagccccactgccccacaggggaggttcggatgccctcaggcaaggtggcgcagcccaccatcactgacaacaaagacggcaccgtgaccgtgcggtatgcacccagcgaggctggcctgcacgagatggacatccgctatgacaacatgcacatcccaggtgggcctgccctgcctctgcccactccaccgccaccacctcacagagagatggggctgggggacacacgaggctgccattccacaaggcccttcttcctgcctcaggaagccccttgcagttctatgtggattacgtcaactgtggccatgtcactgcctatgggcctggcctcacccatggagtagtgaacaagcctgccaccttcaccgtcaacaccaaggatgcaggagagggtgagcaatagctctggtcttgacctgctctgtgcccgggatgccctcaccggggtaagggctggactcaggagatactcctgaatggggctccctgccctgctgccctggccatcggagctcctcagtgcaggccaactggagtgtccccagcatagttcccatgctcacccacggctctctccagggggcctgtctctggccattgagggcccgtccaaagcagaaatcagctgcactgacaaccaggatgggacatgcagcgtgtcctacctgcctgtgctgccgggggactacagcattctagtcaagtacaatgaacagcacgtcccaggcagccccttcactgctcgggtcacaggtgggtggcactgggagcagtgaca

SEQ ID NO: 44779 - DNA, 2300 bp, Homo sapien
tctaggcagggacagagttgggtggggtgcagaagatgaggccgtgggctggagggcgagggcccagggaggcttccggagctgagcatgaccgctccagctcttcccctctctgggcctttatttccccatctgagaactcgggttgcagctgagagctttggggtgaggtgcatcctgagaggcaccccactggggactttggggtctcgggatcttggcacccagggaggcacaagggctcctgcgtgggctgagggaacaaggggtctccccaactcaatgggagccccagccctggccagatccacagacccccatccccaccttccaggggcctctgcgtcccgggccgggggaggtgcatgagcgggtggggctggctggtagtgcagtagcgccagtgtcgactgcttgggcggccagcatggcggggcccggcccagcctcagagccccaaagtgcattctgtggcccgtctccctccttcccccttcccctatcccccagcagtgacgttattcagacattccccaacaggcatggagggtcacctgccccagccagggacacccagggatgctgatgagaggctacaggcctggcacttgggcgaggtggctaaggaaagggtgagagggtggctagagttttgcggcaggagcgagatggctttatagagcaggccgtaggatccgatgtgtgtgtgacaggcgtgtgtgcgcagggcgggggaggctggggagtactgattgcagggccttgggggctttgagggtgggagcaagactcagtaacctcagtttccctggctactgtttgcagaatggagacagggagcccggggtggggaagggggcgctgaagttgctctctggcaagcttgacggccacggggcttcagtgagagccaaattaggaggcatactttgaggatggagtggctgagacctgcggttggctgggagccgggcagggaaagtgggggcagtcgggtacctgtgaggttggggcccaagccactaactagatggcatggggtgcacatgagtgaagcctcccagggcagcgtgggcagccggcagccaggtctggagcctgggagagctgcctggccgcggcaggccagcatggagcctagtgcagcaggagccctcggccgatagtgggacttggtggcagggcccctcgagcttggccttcaagtaggtttcgtgctcctggctgcttccctggcaggaggccaggctgcagggggcactctcactgccaggcctcacagcccacagccccccaagcctccacggcggagacccagatcataacgtcactgtctctcccctttcctcgggcactctggggccctggagcctgctcagctgctctgccctcgcaacccagcagtggtggctgtagcttgggcctcctgttccctgtctccctgggtgctatccccgctctgccaagcctgctgcgctgcgctactcgggtgctaaccccgctgcctcccgcttccccgctcccactcctgtctgcaccgggctgcttttcaccgcgagccttctcagttgtcaggaaactccggtttcaccatcaggcctggggggtggggaggcaagtgtcacatccccccacgctgcagcaggactccgcctcaccgcgtccacacacagcaatgggggccggggccaggccagaagggcgcaggcagccgtgtgcccagccagatgctggcgttcagcagtgtgggccatggtgctggacgaggctgagtaggcaagggagtggctgtcaacacttaggctggagtgggcccttccttttcctcccaggcacctgggtgctactgtcgggcctctcccacatgggcacttgaggtggtcaggagaaaccttcctgccttctgagaaaccactcgccatcccagcttggaggggcagggcggggcaggaggcctggcggcctggctgtgcttggtggtggcaatgagaggcctgtgtgggcggcaggcggacgggaacaacctgaacccgagctcacacgctggcccccctttggggacccaccctgccccaccaggtgctggcatcggccccaccattcagattggggaggagacggtgatcactgtggacactaaggcggcaggcaaaggcaaagtgacgtgcaccgtgtgcacgcctgatggctcagaggtggatgtggacgtggtggagaatgaggacggcactttcgacatcttctacacggccccccagccgggcaaatacgtcatctgtgtgcgctttggtggcgagcac

SEQ ID NO: 44780 - DNA, 2300 bp, Homo sapien
actgcctgcaggccacgcccaccagccccatccgagtcaaggtggagccctctcatgacgccagtaaggtgaaggccgagggccctggcctcagtcgcactggtgaggacaggtaccccatggcaggttgcggggcatcaagggtaggagggcttggggcagggtgcccctacatggtccctgtgtgttcctcaggtgtcgagcttggcaagcccacccacttcacagtaaatgccaaagctgctggcaaaggcaagctggacgtccagttctcaggactcaccaagggggatgcagtgcgagatgtggacatcatcgaccaccatgacaacacctacacagtcaagtacacgcctgtccagcaggtagccacaccctccactacagtcaccgagtccccagcctcctcatgcagcagcctaggggacagctccgagggactttctgcccactctcattccttacctgggagaggacaggcatggaggtccaggagggggttggggagcaattctggtgtctctaaatacccccttcccttctgcacccttcccagggtccagtaggcgtcaatgtcacttatggaggggatcccatccctaagagccctttctcagtggcagtatctccaagcctggacctcagcaagatcaaggtgtctggcctgggagagagtaagtagttggggcccttgtcgcaaaggcctttgtcacatccagggattggctgagctgggtgtcatgtctctctccttcctttcatcgtttccacagaggtggacgttggcaaagaccaggagttcacagtcaaatcaaagggtgctggtggtcaaggcaaagtggcatccaagattgtgggcccctcgggtgcagcggtgccctgcaaggtggagccaggcctgggggctgacaacagtgtggtgcgcttcctgccccgtgaggaagggccctatgaggtggaggtgacctatgacggcgtgcccgtgcctggcagcccctttcctctggaagctgtggcccccaccaagcctagcaaggtaattggggtatgggaggccctaagggtagaacccactgtgctctctgagggccccaaaggtaccccatcttctccagacctgccctaaatccttttttttttttttttttcctgagacagactgtcaaccttgaccctgtttaagtgagagtaaaggggaggagggaaatagaaacccacaaaaagtcatcagggttgaagaatttcttttttttttttttctttctttttttttttttttttttttttttttttttttgagaaagagtctcactctgtcgcccaggctggagtgcagtggcgcgatattggctcacggcaccctccgcctcctggcttcaagcaatactcctgcctcagcctcccaagtagctgggattacaggtgcccgccaccatgcccagctaattttggtaattttagtagagacgagatttcaccatgttggccaggctgttctcaaactcctgacctcaggtgatccacccaccttggcctcccaaagggctgagattacaggcgtgagtgaccgcgccctgccctcctttttgtccttatgactgatggatggcccatctggcaggcagcctgggcccgcccgtgtccctgtttggtgagggcaggaagccagggcaaggggaggcaggtggaaagtcaagcaggaggtctgggatcggggcatagtgtggccttggctcctgaccccttcttccctcaggtgaaggcgtttgggccggggctgcagggaggcagtgcgggctcccccgcccgcttcaccatcgacaccaagggcgccggcacaggtggcctgggcctgacggtggagggcccctgtgaggcgcagctcgagtgcttggacaatggggatggcacatgttccgtgtcctacgtgcccaccgagcccggggactacaacatcaacatcctcttcgctgacacccacatccctggctccccattcaaggcccacgtggttccctgctttgacgcatccaaagtcaagtgctcaggccccgggctggagcgggccaccgctggggaggtgggccaattccaagtggactgctcgagcgcgggcagcgcggagctgaccattgagatctgctcggaggcggggcttccggccgaggtgtacatccaggaccacggtgatggcacgcacaccattacctacattcccctctgccccggggcctacaccgtcaccatcaagtacggcggccagcccgtgcccaacttccccagcaagctgcaggtggaac

SEQ ID NO: 44781 - DNA, 2300 bp, Homo sapien
gtacctggagcctaagtccagccccattgcagtgcagctccactctagaccactggaagccaggcaggctcctgagcagcagagcctccatcttatacagggagagtcaggaccctgcgatcaggggagacttgtccaagagccctgagtacagcaattaattcatggaacattcccccaccagtacctggtccctgggggtgatgacctggacagcctcagagagtttcccgtcaagggtagggtgggatttgcagtcatcagagggtctgggaagggcgtgtgcaggaaaatctgagggcctcagggggttcttcctgggaagtgcaggcagaggagacatcgggatgcaaccaattctaagtcaagaataagaaaactgagttgctccttaaggatggaatggcttgcaagcagtatatgctgtataacttacaatcccaacatgattgagttacgaggaaaaaatatcaacatggaaacattcctcagtgtctatgacaagtagatgattgttcactgagctgttaacgttatttttttatttgtatttttatttttatatttattatttttttccaagacacagtctagctctatcacccaggctggagtgcagtggcgcaatctcagctcactgcaacctccgcctcccaggttcacgcgattctcctgtctcagcctcccgagtagctgggattacaggcgcctgccaccacgcccagctaatttttgtatttttagtagagaccgggtttcactgtgttgaccaggctggtctcaaactcctgacctcgtgatccacctgcctcagcctcccaaagtgctgggatccaccacgcccggcctttttttttttttttttttgagacggagtctctatcacccaggttggagtgcagtgacgtgatctcggctcactgcaacctctgccgcccgggttcacgcgattttcccgcctcagcctcccgagtagctgggattacaggcgcctgccactgcgcccggctagtttttatatttttagtagagacggggtttcaccatcttggccaggctgttcttgaactcctgacctcgtgatccacccacttcggcctcccaaagtgctgggattacaggcatgaaccaccgcacctggcctttttttttatgtttagtgacagggtttcactgtgtgacccaggctggagtgtagtggtgaaattatagctcactgcagcctcaaactcccgggcttaaacgatcctcccatctgtctcctgagcagctgagactaccggtgcacgtcaccacgcccagctaatttttatatttttggtagagatagtgtcttgctgtgttgcccaggttggtctcaaactcccgggctcaattaatccacctgcctcagcttcccacagtgctaggattataggcatgagccaccatgcccggccaatgttttctttaagatcagaatcttcttaatactaaacaaacttaactttctcgtccccctgagcgatcctgtttctgctgcccaccccaggccagacctggcagcgcctgatccatggcagtcaggttcatcccagggctcggagccctgcagtcccgtcccggggccctgcctgacgtaggcgcccagccaacacctgcaacgacctgttgcccccaccccaggaaacaatcccggcttgggacagacaccaggggctgtgactgtgggtggctccttggagaaggtggccttgggcctcggcctttccacctggggtgcgcttggctcccccagactcagacacgcaggatccttgtgattgggcctagacacgagccctgcagtccctgtgggcgctggaggcgactcccccacgaagccctccctcccccagggcctggcggccctcgccggcggtgagctcatctcggggggcggcgtcgcccggcggcgggtcgctggagctcacggcgtgcccccgcacccccgccccccacgcacccgtcccgggctcctgggcaattttaccaattaaggctttctcgccgggccgggccgggcgcggggcgggcgcggggcgggggtgcggccaacaagaaggcgggcggcggcggcccattcgcgtggaggcgcgtcgcgcgcagcggacgccgacagaatccccgaggcgcctggcgcgggcgcgggcgcgaaggcgatccgggcgccaccccgcggtcatcggtcaccggtcgctctcaggaacagcaggtgaggtctccgcggcccggcttcgcgccgtagggtcgccgcgctcctcgtcggccgggggcggggt

SEQ ID NO: 44782 - DNA, 2300 bp, Homo sapien
ttaggatctttgcgtgtagtcaaaacagggccccatctcctcattactcccccaggtgtctacctcttcccaccccatgggcaaacctccatggatgactggtctgtgaccctcaccagccaggccagccattctggacatgaccagagccctcccctcttcttcccttgtcaccagccctcaactgtgaaactacagatggcatgtcacctcttcatgctcccagtttggggcctacccagtgaggggcacactagttgattccatacaccctcagctggctttgtttagaatgtgaatgtcacagccaggcgcggtggcttatgcctgtaatcccagcactttgggaggccgagccggactgatcacttgaggtcaggagttcgagaccagcctggccaacatggtgaaatcctgtttctactaaaaatacaaatactaaatactaaaaatacaaagccaggcatggtggcatgtgactgtactcccagctactcgggaggctgagacaggagaatcacttgaacccgggaggtggaggctacagagagccaagattgcaccactgcactccagcctgggtgacagagcgagactgtctcaaaaaaaaaaaaaaaaaaaaaagaatatgaatgatgaatgtcacctcctttctcttctccatgagacagccaatatctgatcaaggccctgggaatgggaatccatagctcgccacccacgtctgccccctgcctagccacgctgcgctcagggaccattccgacaggagaggacgccccacttcagctccccccagtgccccgggtgaatgaacggcatgaagggttaggcgggcacacgtcgtctctgcacgcatcgcacggcgccctctgcccgcgcccactggcgtgcccgtcggcatgcccgggccccttcgaagactgcttgcttctggagtgccagcggcctcctggcccagtgccccatttcctcccgggtggagcgagggaggaggaagggaagcagaggggtaggcggtggtaagcagcaggcacatgtgcgcgggcgagagccccgcagactgggaaggcgggcccatggcagggggtctgcggggatcgcgtaggcgcgggccttgccctgcagccgcttcccgggcgatgcgcacacaaagcgccctcggcagcgcctggcccggggcccgcgctctcttagggtccgggcccttcccgccgctgctggggcggccgaccgggatgcggccggggaaccctaggctctggggccctgggaagggggacgacggcggggagtagggatgtgcagggatcgggcgaagcccaagcgacttagggaccagagccaccccaagcgccgacttcgcccgctcgcacgtcccgggtccctcgcgcgcaggccccgcccctctcaccccgccgcacgccacagggtgacgtctgggctcccagccgcatcgccctgactcccgcgcgggccccgccccctgccgctagccaatctgtgcgtttgtgacttttgggcccgcagccccgcctgctcccacagcgataccggtttgcattgccctgactcccgcgcgggccccgccccctacgccgctagccaatccatgcattagtggcgtccgggctcgcagtaccgctcgctcccaccgcgagaccttctgctccgcgcccgcgcgggcccctccccctccatcgctagccaatccccgttttgtgacgtatgggctcgcggccccgctcgctcccaccgcgagaccttttgctccgcgcccgcgcgggccccgccccctccatcactagccaatccccgtgcttgtgacatatgggcttgcggccccgcccgctcccatcgcgagaccggttcccaccgccctgactcccgggcgggccccgccctctccgccgctagccaatcctcgcgttgatgacgtttgggctcgcggccccagcctcccagctctcagggcacggccggtctgtgccggctgctcccgcggttaggtcccgccccgcgcagcgcgcgcagcctgcggagccagcggccgtgacgcgacaacgattcggctgtgacgcgacaacgattcggctgtgacgcgagcgcggccgctcccgatgcgctcgtgccgcccccgccgtgctcctcggcagccgttgctcggccggttttggtaggcccgggccgccgccaggcctccgcctgagcccgcacccgccatggacaactacgcagatctttcggataccgagctgaccaccttgctgcgccggtacaacatcccgcacgggcctgta

SEQ ID NO: 44783 - DNA, 2300 bp, Homo sapien
gtagactaggctggagtgcagtggcatgatctcggctcactgcaacctctgtcttccgggctcaagcaattctcctgcctcagcctcccaagtagctagtattacaggtgtgtgccaccacacccggctcatttttgtatttttagtagacagggtttcaccatgttggccaggttggccttgaactcctgacctcaggtaatccgcccgcctcggcctcccaaagcgctcggattacaggcgtgagccacagcgcccggccatacacgaatttttttgagacagtcttgctctgtcgcccaggctggagtacagtggtgtgatctcagctcactgcaatctctgcgtcctgagctcaagcgatcctcccacctcagctgggattagagtgtgccgccacgcctggctaatttttaaatatatatatatatatatatttttttttttttttttttttttctgagacggagtctcgctctgtcacccaggctggagtgcaatggcgtggtctcggctcactgcaacctccgcctcccgggttcaagcgattctcctgcctcagcctccgaagcagctgggattacaggcaccagccagcatgcccagctaatttttgtatttttagtagagacggggtttcaccatgttggccaggctggtctcgatctgctgacctcatgatccgcccgcctcggcctcccaaagtgctggaattacaggcgtgagccactgcgcccagccaatttttagtttttaatttttgtagaggcggtttttcgccatgttgtccaggtctcaaattcctgggctcaagtgatccgcccacctccgcccctcaaagtgctgagatcacaggcgtgagccacggcactccgccgcaattcctgacttgtactgccccagtggtgttacagcctcgaacccagtttccagacctaagtcaccgccggcatccagagtcccatgatggaaagggaggctaggttcccctgggaaggaccttgcaccactgctgcaagtgcaccccagaaatcgtcccaagcttttctcaaagggacctgcagccatttataaaagcgacatatcatcctggaaaacaggtgcgctcgagcaggatttcctcccgtccttcctgtcaaaggacgggaagactttgttaccccaccgcgccccacctgcagaatggtggacagatacctccagatgccacttcccccaggacgcccgcctgctctgcgcacctctccccggatgctgccccgtgggcgggtgggggcggccctgcttccccacgacccccagacgcacccggagggactcttgagcacagtggagtgggaagggcgaggtggggcggtgcccaggcgagagcggctcatgggaggcggcgcccgagacgcagctggtcgggacggtgcgggtcagggtgggcggagcggggctagagatgccccggggtttcccaggccatgagtctccgtggagatttctcctcgacctcttccccgcggcaatgtgcgaaccctgggtctccaggaaacggggatacggggcatggctcccagcaaggcctggtccagcctctccggtaggggaatgggtctccccctccggcctcccgggttgacaaaggaacgcgggcccagatccccgtatggcgcttcaccgccggggcctctagcctagaaggaggcacggagcgcgtgtccgagacccgtgcaagctcagggacactctcgcggtcgccgggaggcccacctagggtactttccttttttccactctcagaaatatacgtctgtcacagttaacggcaaagcctagggcaagagttctacgcccaagatggccagccggaagcgggcttctcgcgaccatgtggcgaagccccattcgtcagctggccgcccgcggccctggtacccggtcacctctctgatctgcgcatgtgctgggctacgcccgggcgcaagcgccaagagcggctgcgtctatggtcatgacgtctgacagagcgtccacccgtcttcgacaggactctatggttcttacgcgcgcagacagaccgcctatataagccatgcgcaggcggaggagcgcctctttcccttcggtgtggtgagtaagcgcagttgtcgtctcttgcggtgccgttgctggttctcacaccttttaggtctgttctcgtcttccgttccgactctctctttttcgttgcagccactgaagatcctggtgtcgccatgggccgccgccccgcccgttggtgagtcttgaatccgtgtactttcactgctggg

SEQ ID NO: 44784 - DNA, 2300 bp, Homo sapien
aggtggacaggaagtagaatttattggtgagtattaagaggggggcagcacattggaagccctcatgagtgcagggcccgccacttgtccagagggccacgattggggatgtacttgaccccacagccatctgggatgagccgcttttcagccaccatgtcttcaaattcatcagcattgaacttggtgaagccccacttctttgagatgtggatctaaggagcaatggaaagaactgagtcaggaggcctggggcaaaggtgggagaagggggctgcagcactacataccttctggcggccaggaaacttgaacttggccctgcgcagggcctcaatcacatgctccttgttctgcagcttggtgcggatggacatgataacttggccaatgtgaaccctggccacagtgccctggggctttccaaaggcacctcgcatgcctgtttggagcctacattggggtagtgcaaggtcagaaacatgaacatccacctgaaaggcctgtctccaaggtcccttagagcaacccatacaaccaacaggctgcgtacactaccaaggaagctgctgtgtgcagccatcgcacactgggtccccatgaggaaaggaactcagtcggcttaattggctgcggagcatcccaagaaccactgaaaaggcgccactgggctcctctgccagcttcagctacctgctggcaagatggttgtcattcagctaaaagcaagaagagctactcccatcaccagtgtttcccctaacctgtggggaagagcttgctaagacttactcatgctttgtttgtatctgcaggaaggggtcctgagtgaccactgaaagtcacttgccagcctggcttttctagtagccatagtggctgagtcactggggccacctctatgctctgataaaataatgcaagcctaataatgtagagactccaactgccttaaaaggcccagaccaagctcacctgtcagccccagcacaggacaacatcttgttgatgcggatgacgtggaaggggtggagccgcacccggatatggaagccatctttgccacaactttttaccatgtacttattggcacaaattcgggcagcctccagggctaggtagggagaagaaaagcagcaaagtgagagaagataatagagaaacattcaccacgactatctccagctcaggggaactgtgttggctgagttttgtaaggctcatgtttcatcaactcccaattccagtgcagtgtatgtgggtggggttgagggagcacggaggaaggactggggggtgacgaacaaagaatcctgccttaccttcagaggacagctgctcatattcatctgacaccatgtggccacaaagcggaaactcatccacttttgcctttttccgccccaggtcaaaaatgcgaatcttggcatctaaaaggattgggtaagtgtgcagggggtgtcacagacggacgcggagtccgcagagccaaccagtgcaggggctcttccactacttaccagggacacctcggcagaagcgagactttgggtacggcttgttcttacaataccggtaactgcaggggagtgaaaaaacacaggttaggtgaggttcacagaaagcccaacaggcactttgcccctcaaggaacaacccaaacgagggacgggaaaagggtggggaatgcacgtccacttctaaaccgtttccattcggggaaataaactacaaagcaacagttggctgctgcaacacagacaacacccaagactagaaacaacagacaccatcttccgttactttgtcttacgcttcctataaacactttgcaacaaactttcctagttaaaaattctctcttcaagacactgcgtactacaaaatcgccgcattatcattgcacagctcaggtcacccaatttaagactttcgggcacgtggcactaaatccacctccaagccgagtggaaatgcgtctggcgccccctgtaggacacaggaggcggccgcacccgtttttcccggactgcccttcacgtccgacaacgcacgcggcacgtcgcccggaaataagacagagaacgcacacaaaggccccaagagcgtatctagcgcccgaaaatgcggtgagcttgcaggacacaggcagagatacgagggaaccgtcgcttccacaccgacacgggaacgaaggaacagacagtaatattgcagactaaaaaatagccgggaggtgtaaaacatagggtcagttcccaagacagggccgccgcacgggggaggctccaccccacaat

SEQ ID NO: 44785 - DNA, 2300 bp, Homo sapien
tctgttttttgtttgacacagggtccagccagacccaggctggagtgcagtgatgggatcatggctcactgcagcctcgatctcccagactcaagcgattctcctgcctcagcctcccgagtagctgggaccacaggcgcccgccatcacactctgatccacccgcctcggcctcccaaagtgttgggatgacagccgtgagccaccccgcccagccacatatacaatttgacatagttacagtactacatgatactatgtgtatgtagcaatgtataatctactgtatggcaaaatatacaatatatacagcaatatatacaaacatattgtgtatcatatgtaatacaagaaacagtattttataccatctgatacagtcacaatgtcagctactacctctagttctgaaacatattcatgacccggaaagaaagccccctatgcattaagcagccagttttttatttttattttatatttatttatttattattatttttttaggagtctcgctctgtcgccagactggagtgcagtggcacaatctcggctcactgcaacctccgcctcccgggttcaagctattctcctgcctcagcctcctgagtagctgggactacaggcgcaggtcgccacgcccggctaatttttttttttttttgtattttagtagagatggggtttcaccatgttgcccaggttggtctcgaactcctgagctcaggcagtccacccacctcagcctcccaaagtgctaggattacaggcatgggccgccgcacccggcagttttttatttttatttttatttatttttatttttgagacagagtcttgctctgttgcccaggctggagtgcagtgacgagatctcagctcattgcaacctctgcctcccaggttcaagcgattcttctgtctcagcctcctgagtagctgggattacaggcgcaagccaccacacctggctaatttttgtatttttagtagaggctgggtttcttcatgttggtcaagctggtctcgaactcccggcctcaggtgatctgcctgcctctcctcccaaagtgtgagtcatcctacctggcctgttttttatttttaaaccataatttattgatttttttttttgagatggagtctcgcactgtcgcccgggctggagtgcgagtgcagtggtgtgatctcggctcactgcaagctccgccttccaggctcaagcaattctcctgcctcagcctcctgagtagctgggattacaggcgcccaccaccacgccgggctaattttttgtatttttagtagaaacgggtttcattatgttggccaggctggtcttgaacgcctgacctcgtatccacccgcctcagcctcccaaagtgctgggattacaggcatgagccaccacgcccagcccataatttattgattttttaaaatttgtccagccttctattaccacgtcgaatccattagctacagccatcccatgagaagctgagtggattcagccccacctcctgctcacagaccctgtccgagcacctcatttgtcccaacagcattactgcaggacccccaggacgttggactgccagctccctgggtctcctcctctctggggcagatcctcagtcctcccttgacttcacgactgtggccagatcatgtgtggactgtccctctctttgggtctccagagcgcttgcatcaaacacccctaactcagaagtgtgcagccacactgggactcagaacccaacaacagggacagaagactcacgcccttggggtgcccggtctcgtggcatcaggcatgacttccagctcctgcgccttccccagcaactgctgactggggacccagaccgggagctgagcgacgggcctggcgagcgaagctcggggtctcactcaggcaccagcccctccttgccccaggcttgagtgactcacaggtctgtcatgtcccgctggcccgggaaggcggggtctgggtgggaaggtgggcgggcaggtcagcagttcccaggcctggtgctggtcctccttgttggcggcgaggcggagacggggcgggcctgcctgttggcaagggtggggcgtccggcccagccaggcccttcctggccgggtggctcaggaacacagcctcttcctcttttttttcccctcctagccctattcaggcaggagctgctcttctggggtatcgcgatccacttaaggatgaggcagacttggtgacaagctggtctgagcaggtatgggagccccctggggagacggaagaaggg

SEQ ID NO: 44786 - DNA, 2300 bp, Homo sapien
ctgtgagtcactcaagcctggggcaaggaggggctggtgcctgagtgagaccccgagcttcgctcgccaggcccgtcgctcagctcccggtctgggtccccagtcagcagttgctggggaaggcgcaggagctggaagtcatgcctgatgccacgagaccgggcaccccaagggcgtgagtcttctgtccctgttgttgggttctgagtcccagtgtggctgcacacttctgagttaggggtgtttgatgcaagcgctctggagacccaaagagagggacagtccacacatgatctggccacagtcgtgaagtcaagggaggactgaggatctgccccagagaggaggagacccagggagctggcagtccaacgtcctgggggtcctgcagtaatgctgttgggacaaatgaggtgctcggacagggtctgtgagcaggaggtggggctgaatccactcagcttctcatgggatggctgtagctaatggattcgacgtggtaatagaaggctggacaaattttaaaaaatcaataaattatgggctgggcgtggtggctcatgcctgtaatcccagcactttgggaggctgaggcgggtggatacgaggtcaggcgttcaagaccagcctggccaacataatgaaacccgtttctactaaaaatacaaaaaattagcccggcgtggtggtgggcgcctgtaatcccagctactcaggaggctgaggcaggagaattgcttgagcctggaaggcggagcttgcagtgagccgagatcacaccactgcactcgcactccagcccgggcgacagtgcgagactccatctcaaaaaaaaaaatcaataaattatggtttaaaaataaaaaacaggccaggtaggatgactcacactttgggaggagaggcaggcagatcacctgaggccgggagttcgagaccagcttgaccaacatgaagaaacccagcctctactaaaaatacaaaaattagccaggtgtggtggcttgcgcctgtaatcccagctactcaggaggctgagacagaagaatcgcttgaacctgggaggcagaggttgcaatgagctgagatctcgtcactgcactccagcctgggcaacagagcaagactctgtctcaaaaataaaaataaataaaaataaaaataaaaaactgccgggtgcggcggcccatgcctgtaatcctagcactttgggaggctgaggtgggtggactgcctgagctcaggagttcgagaccaacctgggcaacatggtgaaaccccatctctactaaaatacaaaaaaaaaaaaaaattagccgggcgtggcgacctgcgcctgtagtcccagctactcaggaggctgaggcaggagaatagcttgaacccgggaggcggaggttgcagtgagccgagattgtgccactgcactccagtctggcgacagagcgagactcctaaaaaaataataataaataaataaatataaaataaaaataaaaaactggctgcttaatgcatagggggctttctttccgggtcatgaatatgtttcagaactagaggtagtagctgacattgtgactgtatcagatggtataaaatactgtttcttgtattacatatgatacacaatatgtttgtatatattgctgtatatattgtatattttgccatacagtagattatacattgctacatacacatagtatcatgtagtactgtaactatgtcaaattgtatatgtggctgggcggggtggctcacggctgtcatcccaacactttgggaggccgaggcgggtggatcagagtgtgatggcgggcgcctgtggtcccagctactcgggaggctgaggcaggagaatcgcttgagtctgggagatcgaggctgcagtgagccatgatcccatcactgcactccagcctgggtctggctggaccctgtgtcaaacaaaaaacagaaacactagagagacaaaaggcgagcgcaggaggctgccaggaagcgggagccccacggggtgacggccacttcccgccgccccggggctggcctcgctgccgtcaagcggcccgtgcgcgctttgcgacagtcggtcgggctgggcaccggcgcaggttcgctttccggcggttgcaccgggccggggtgccagcgcccgccttcccgtttcctcccgttccgcagcgcgcccacggcctgtgaccccggcgaccgctccccagtgacgagagagcggggccgggcgctgctccggcctgacctgcgaagggacctcggtccagtcccctgttgcgccg

SEQ ID NO: 44787 - DNA, 2300 bp, Homo sapien
ctttctctcttctttttccagcacctggcatgtgcctgcctgtgtctagaacacctttcccctcattctctgcttggaaaaattctgctcctgcagaggaaggagcaatctggattcaaatcctggctttgccacctcctaccccatgaccttgggccagcagcttaatctctgtgatcctccctgtctggagaatagggatcaaaatggcccctatcccctggggttctcaccccacaagcctgtttgttctcctagaagcaaaaccctctggcctgcaggtacatgctactgccaccatggaccaatgacaacgcactgttctcaatgagtctcttagtgacatccctgagagaaggggttatggataatgcctccttgaattctaatgccaaggctccaggtccacaggatccctgggcagttgcagagagttgaggactttccaaggacccatccctcctcccacagcctctgtcccctctgctggcatgtgatggagctgggcctcatgttggctcccgggatgcctacccccataggtccctccaaaacagagacactggccaccagctttcctgccccagaagtgcctccctgcactcgctggaggagcagctcacctcggcacacaggcacacacttgcccaagctgaagaagtgggagtgtagctccttggtgaagcagatgtctgcagctgcaggggtcctaagcagggacagatgcaattagtcctgccccctgcaccccgctccaccaccctgcccccagcatcagcatgcagaagggaggcacaggggagggcctgcggggccccaccccatgccctgcctggactgctggacgccacctcctgggcagagcaggaggagggcaaatctgggcagaggcaggtggggccggcccggcccacttcgaggggcccattcctcctcaccaacgcatcaacttcaggttccagatgtggcggagtttcaggatccctagaggacaggaaaggcttcatgccccaacttcccatatccccagggagtgcccttccttcaccccatctcagggaatgagggacagcagcactaccatttccctacagcccaaagtggcatctttcagacccttaggccagatcattcagttctccctggctcctccctctcccccaccctccacatcttactaatcactgcacctggactgcctacctccccaacatacttggacaatgcccattcttctatacttctccctgtactgtcactgcaaccagcccagtctaggctagtggatggctccaagtcctccttcctggcctcccaggatccacctgtgacatctataggcctttctccacccagcagccagggtgagctctgaagggctccagtgtggctaggtggctccccatgaactctaggacagttaagctctctgttcaggagtggaagccccaggcacccctccacccggccatctggttaccagagccaagcaacttcctgtgaagtcagcagagcaggaacctctaggtgtggcaaccaggctcccaaatagggctgaacggtacacgcccagccaggggcaaacctgaagccaggacactgggcttccagtccctggcccagaacttcctcacaggatatcctatgtccaacccccaaatttttcccaagactgtggggccctggatggtttagagaacagagggttctggaggcctgacgttaaaggagctgtaagatatgccctgtggccgttccttggtcctgctccatgcccaaggccctctccaaatcatgctccctcagggatgctgcaggagccacaaatccaagtctcagccctggggcagaacgcccggaaaccggagtgccagggctccatgaaaaggcagcgagaaggggtttgttctgacgaggctgggcccgtcccgaatcctcgcctttcctccccctgcccagcacactggcccgggtaccccagagatgagggtcgtccatgcaggactggtgattggacacggtgatgaggggcgtggccgggcctcgcttctcgatgagctcgtacagcacctccctgttgtgcacggtcaggtggttcatgtactctggcggggaaggagaggtcaggcgctccgggctcgcccgctaggtcggggccgcggcgtcccccaccctaagtcccacctccggccgggcatgggtacccgggcgggcctgcctcggcctgggcccactcactggtccagaagcagctgtaggtgcccaccaagcccatgacgacgctgctggccagggtccag

SEQ ID NO: 44788 - DNA, 2300 bp, Homo sapien
ctatgagcagagatcgcgccactgcactccagcctgggtgacagagcgagactccgtctcaaaaaaaaaaaaaagagagagataccattccagttgcaatgtggctgcagcagggctaggtggacatgaggagcccagttcagggctgtcacagtagctccagcagcagatgattgtggctgggcctcccaagtgtcacgttggagaaccggagaaggggacttctttgggatgtactctggacttgttgatagattaagtgtaggtggggtgaggaagagaactcaaagatgacaccaggtgttggagctgagccacggggagaagggtgcaaagggaaagcagtgcgggggctgggaggggagagggtcagtcctgttttgcttgtgctgcatctgaggagcccctcacctgtggaaggagagcagtcccagaggcagtggggtgtgcagttctggaacttagaagaatgatcagggggctgggtgcagtggctcacgcctgtaatcccagcactttgggaggccgaggcgggcggatcaagaggtcaggagattgagaccatcctggctaacatggtgaaaccccatctctactaaaaatataaaaaattagcagcgcatggtggcaggcacctgtagtcccagctattcaggaggctgaggcaggagagtggcgtgaacccgggagacggagcttgcagtgagctgagattgcgccactgcactccagcctgggcgacagagcgagactccgtctcaaaaaaaaaaaaaacaaaaaattatcaggaataaagatactgggaattcaaccacaaaaaccacaaagtcacgaatgcagagtgagagtcttcagagagagggcagaggcccaggatggcacagagggagagagaagccaccaagatggcagggagccatggccagagagaaaagcaaaccaggcgcctgtggcaccatggaagcagcaggtgatgctggagaagcgtttccatgcagtgacagctgccagagccagattattatggcctgagggctggtggtgctgcagttgggggggaatggagaccgcagcgggggaatggagaccgcaggggcggcaactcctcccagaggttcagtttggaggaaaaagagacagaaggaagggtaaccaaaggatattagaggtcaaggaggggtttattatttctagctggtcaaagtagaatgtggtaaaacccaataaagtaacagcaaataacaaagaggggcttttaatggaaagctgcagtgcctgcccctcacctccctagccccactcctcagaagcagccccctggagcggtttctctttctgctgcttttggaggctacttctgtctctgtaaaggaacttctgtctctgtaaaggaacaagcagaggccacagtgtcttggcaaatgaccgtggcattgtttatcccaacctgctctgagagatggggactctgctgattcacccctcgtccctgcctctttagttccttcagcaaagaactaataatatgtcattaaggcaaaggcagtatttggcacacttggcttctgtgttccaaaaaattccctttttctccaagcgtagattttaatatggtatttaagtatcaaagtgatttgacacaagtgacacaagtgagcagtagtagcatttgcaaaagctacaaatgatgaagtcttgctccaaaagcatattattattattttttaaattccagtttcaagctcaatggataggttgcgtcagtgggttttagtagagaaggggccagtacctatgaagactcccctgtactattacacatgctgcgtcccaagtagggaaactccagtgggtcatcaccccctccctctagcccaagtgggctgctgggtcagggcactgtttgggttgggttgagattcctggatccctaactagcaccttccaaagaatcggccttgcagagaacaaagttcattgccaaaggtattcccaatgtctgtctctcgctctgtgatagggcttctttactccccactttataagatgaggatatctgctataccccattccttcaacctctccacctctttcctcttttgtctgccatgtgattacttttccatcaccaaggttgatgagatccttactgtgtacttactgtctccaagcatccccaggcttccagccagcacgcagcagccaacattggcttcagaaggaaggaggtttgcatttccttctcttgggtccagtgccatggtctcagggttatctccaatgtggaaagttgctagacc

SEQ ID NO: 44789 - DNA, 2300 bp, Homo sapien
gtgcccggccctttttttttttcttttttttgagatggagtttcgctcttgttgctcaggctggagtgcaatggcacgatctcggctcactgcaacctccgcctcccaggttcaagcaattgtcctgtctcagcctcctgagtagctgggactacaggtgcccgccaccacgcccagctaatttttgtatttttagtagagacggggttttgccatgtttgctaggctggtctcaaactcttgacctcaggttatctgcccgcctcagcctcccagtgttgggattacaggcgtgagccaccacgcccagccaggatttcaatgaacaaaatgcttttaccctaaagatgaagtccccagacagaaggtgctcattggtgctgtcaacatttggtgattggttcagtttagatatcacctcctggtgggagcagcttcatcggtgcccctctccttacatccctcccagtcccatgtctcaacctttggaatattcatgaccctgtatcatgacctgctgtcctgcatgtcctctagaccaaactgtcaacttccggggcagagtccaggtgcctggcccatagcaggtgcttcaggaagcctccagggccatcactccagggacccctagcaatgcagggaagaataaaagcagccacaggtgggtttcttccctaagcatggaagcagctcagcaacagagtcctggcggaggcaagattgccttccgcattccagaggaagtatttgccttgaaactatgtaacaaaagtaacagaaacataatagacatgctttcctttttaagtttgctggattctcctgggatacagtgaagctccagtgaaaacctctctcctcagctagttaaggcctggaaatggccacttgggggtttccctaagcacccgaaactcagtgagcccccaagtgacctcgtctcccagtccccaactcagagagacccaaaagctacaatcttctttgactgtattgtcagacccacttcctctctccagctcaactgccactatcctagtcctagtctgaatcacatgtgacaatcatgactacaatcttttttttttttttttttttgagatggactctcactctgtcgcccaggatggagtgcagtggcgcgatctcggcccactgcaacctccgcctcgcgggttcaagtgattctcctgcctcagcctcccgtgtaactgggactacaggtgtgcaccaccatgcccagctaatttttgtattttcagtagagatggggtttcaccatgttgtgcaggatggtctcgatctcttgacctcatgattcgcccgcctcgggctcccaaagtgctgggattacaggcgtgagccacagcgcccggcccgttagggtgtctttgatgccacgcttcgctctgggttttctccttcctctttgattgctccttgtccgatctcttttctggacccttctcctcctgcccaatgtaagtgctgggtgttcccctagatgctatcctgagcccgcttcactcctcgttctaagggattacagtctcctctcacctgtatcagggagggtccatctgcaggaaaaagacaccacttttgcaattttaaggaaaaggattaaaacagggattggccgggtgcggcgatgcgcgcctgtagtcccacttttccggaggctgaggcgggaggatcgcttgagcccggggactcgagaccagcctggccaacatagctagaccccgtctctaaagaaaaaaaaaagacaaaagaagagaacaacaacaaaaaaaccaaaataaaaataaaaataaaaacggacgggcgaacgcgtcgggtgggcgtagggttccgcgaagcctccctgtccctcttgtctcgtcctagtcggtctagctgggccccatcccctttcccactcggagcgtgagcgcctggagacacgtacagccaaccagtgagaaggagtggccgcgagtggcatgcacttggtccaattacctgcggccctgccggtcggcccgcgctggggccaatggaggtgcgaggcggggctcgggcgggggcaacggtcacctgatctgcggctgtcgaggccgctgaggcagtggaggctgaggctatgatggcggccatggcgacggctcgagtgcggatggggccgcgatgcgcccaggcgctctggcgcatgccgtggctgccggtgtttttgtcgttggcggcggcggcggcggcggcagcggcggagcagcaggtcccgctggtgctgtggtcgagtgaccggtgagcgggccggg

SEQ ID NO: 44790 - DNA, 2300 bp, Homo sapien
tcactgccatatccccaacacttcacaatacctggcacatagtaggctttccatattgggcaaatgaatgaatgggtgaatgccctaagactgggggatcctggctagatgttttatgtggattataagaattccccctcacaggccgggcgcggtggctcacgcctgtaatcccagcagtttgggaggctgaggtgggtggatcacgaggtcaggagttcaagaccagcctggccaacatggtgaaaccccatctctactaaaaatacaaaaaaatacaaaaattagctgggtgtagtggcgggcgccctgtaatcctagctactcgggaggctgaggcagagaactgcttgaacccgggaggcggagggtgcagtgagctgagctgacattgcaccactgcattccagcctgggcaacagagcgagactccgtctcaaaaaaaaaaaaaaaaaagatttcccactcacagccctctgatataggtggtgtcttcattttacagatgtagaaactgtcattcacaaagattatttcatgcctccaatggctggttacatggtagaactaggactcagttcctatttgactatattatttaccacctcctgaaaagacttcaggccaccaccatctgcccacacagcaaccaagggagactacaagggcaatgagccatacaggccaccaacaagggagggcctagcagagacttgctatcttagagtcatctcatggtctccacgcctgcttttggggcaaagatcctggatgggaaggaaaacagcatgcgggttatgagctccaattgggagggaggattggcagactcaggctggaaccaaagtggtatctatcaactgtagtgaaacattgtatctcgacaaaccttactttccttggcagtgaaaccaagataatgacatcagtgtagcaagtgcctacaaagcactaaacaggtgagcattttccaattatcattattatgatcatcacagctagaattacaactctgccacccattagctgtatgagcttggacaagtcacttaacctccagcctcagtcttctcatctataaacaaacagggacgataatccccacccaccatattggactaagtcagatatccaaagtgcttggtactcagtaggtacctggcctctggtccgtcgcttcctccaatcaagttggtgccatttccgaggctgtcgccatgcccactgaagcgtttactacaggccttcccatgagacgacccacacctccctacagttgggacaaggtcactgaagcttcccttggggaatgggcgtcagtgtcatggggggagggggcctggctgcctcccgatgaccgggggagagtgggctggggcgggcgcaccttgtcctgcaggaacagcagcacattcctgggacccagctccagggcgggatctaagtaggtagagagctgcaagtcgctggtgatgtggccttcatgagtgtcggccgcaggagcccacaagtccctggcagggcacagaagaggtgctgtcagacgggggcgcatgtggactggagctctgtcgccggcagattcgctgcgagcccccgagcaaggaacagtccacctccgggcctcaccacccctcgcctaggacagcgccggagtcgggcgagggcgcctcagccgccacagcgcatcccaccccggcccgctcaccggtcactcgaccacagcaccagcgggacctgctgctccgccgctgccgccgccgccgccgccgccaacgacaaaaacaccggcagccacggcatgcgccagagcgcctgggcgcatcgcggccccatccgcactcgagccgtcgccatggccgccatcatagcctcagcctccactgcctcagcggcctcgacagccgcagatcaggtgaccgttgcccccgcccgagccccgcctcgcacctccattggccccagcgcgggccgaccggcagggccgcaggtaattggaccaagtgcatgccactcgcggccactccttctcactggttggctgtacgtgtctccaggcgctcacgctccgagtgggaaaggggatggggcccagctagaccgactaggacgagacaagagggacagggaggcttcgcggaaccctacgcccacccgacgcgttcgcccgtccgtttttatttttatttttattttggtttttttgttgttgttctcttcttttgtcttttttttttctttagagacggggtctagctatgttggccaggctggtctcgagtccccgggctcaagcgatc

SEQ ID NO: 44791 - DNA, 2300 bp, Homo sapien
cactgcaccctccgcctcccgggttcaagcagttctctgcctcagcctcccgagtagctaggattacagggcgcccgccactacacccagctaatttttgtatttttttgtatttttagtagagatggggtttcaccatgttggccaggctggtcttgaactcctgacctcgtgatccacccacctcagcctcccaaactgctgggattacaggcgtgagccaccgcgcccggcctgtgagggggaattcttataatccacataaaacatctagccaggatcccccagtcttagggcattcacccattcattcatttgcccaatatggaaagcctactatgtgccaggtattgtgaagtgttggggatatggcagtgagcagaagaacccaagcccccaccctcaggaagctgacattcttgtgagggtggccagtaaatactaagtcggtataggatatgatgtcagtgttacggcctttagggaaggaagcaggctaaggggacagagtgactgggatgctattttagataagggtggtcaggccaggcctcattgaggaggtgatatatgagcagcgatcttaatggagggagggagccgtttggggaaggacattcctggaacagcaaattcgagggtcctgggcgaggtgtgctcttggccagctcaaggaagagctggtgtggctggagcacagtgagtgagagaaaggggtaggagatgtaggagatggtttgcaggtggctaggcgatgaagtaggaccttgtaggccatgagggggaaggtcagttgcagttcgaaatgtgtgagaaagccttgggtaacgtggagcagggagtggtgtgatttctcaattaaagaaagcccacaggacccaccagcagttcctgggctttccgactgagaaccccggtggccaaacagcagcaaggtcctgcccacaagggaggggaggctgggcgagtgtgtataccaaacaggttagggaagctgattaaaatctcctcagggcctaactgggaagggccagaggaagctggggatgggagtggagggtaggagcaaaaggacaaaggacatctgtaggttgtggagaaaaagggatggggtcggggccactgtggtcctaagagctcaaaagacttcaatgctcgatgcttcctccagcatgttctgagatcctcacctctccccttccgccaaaagcaggtggggggagggtcccgtccagactggacatagccgactctccttttctctggctgggaggcctgccacaaatgctcttggctgccccaccccctccccgcagcttccctgttccctccccagttcctcttgtctgtagggtgggcaaggcggctgactcctactcctgagttaccacaagtcagctgcctgcagatctccccaccccatgactgccttccatgtcttctcaccctgccctgagagtgctggagggaagaggtgagtctcccaccccacccccaccaacacacagttgcgctccaccatactgaacctgactctcagtgagactttgctggccctgagaatgcacggggaaggtggctgtcccctgccttggcccccatcacttgccaaacctcctcagatgtctcccctatttccctaatagctgagcattgaggatttcacagcatatggcggtgtgtttggaaacaagcaggacagcgccttttctaacctagaggtgagagtcctctcccagccaggggccatgggggacattctgtgctccttctcccagcataagaactgtactctgacctcatatcagggttacttgggtctgagtctcttctgggtcaaccatcccccccaaaaacaacaacaacaacaaaagccacctcatactcttagggagcagagacgctggctttggggtagaaaggcctggggcctgaatgtcaggggctggggtgtgggccattttcttggtgagcctttatgggtatggcttgccagaggagagctgccagagaggtgtggggggctgggccaggcccactggcccctggctaactcaccttttgcctctcccctgtccccagaatgccctggacctggccccctcctcactggtgcttcctgccgtcgactggtatgcagtcagcactctgaccacttacctgcaggagaagctcggggccagccccttgcatgtggacctggccaccctgcgggagctgaagctcaatgccagcctccctgctctgctgctcattcgcctgccctacacagccaggtactgcccgcatggcccagccac

SEQ ID NO: 44792 - DNA, 303 bp, Homo sapien
gctggggaggggcagtcgggccagacttgtgtccagccactggaacccctctctgcgtatggccagcgcctctggcctgagttgacggagctcttcctgtggccagacatctacgtgtgcatgatctcctatgcacacaacgtggcggcccagggcaagtacatagctattgccagcactactgtggagaccacggaccctgaaaaggaggtggagccggctctggagctgttggagcccattgaccagaagtgagggactgggctgagcccaagggggagagggagggagcccagcagctgg

SEQ ID NO: 44793 - DNA, 2300 bp, Homo sapien
ccctctctgcgtatggccagcgcctctggcctgagttgacggagctcttcctgtggccagacatctacgtgtgcatgatctcctatgcacacaacgtggcggcccagggcaagtacatagctattgccagcactactgtggagaccacggaccctgaaaaggaggtggagccggctctggagctgttggagcccattgaccagaagtgagggactgggctgagcccaagggggagagggagggagcccagcagctgggcttagggaccaggaagggcatggcccattgtgaggcctgtcccctcccctctgtctgcccctcaggtttgtggctatcagtgacttgtatgagcccattgatgatggttgtgagagccaggtaagcagctcgtcccagccctgggctcctggctgcccgcccaggatacctgtctgactcaccctgggcgctgggctctggctgtttccaggtgttctgttcctgctcctacgatgccaccacacactttgagacaacctgcaacgacatcaaagacatctacaaacgcatggctggcacggcctttgactttgagaacatgaagcgcaaacagaacgacgtctttggagaagctgagcagtgattgtggccgcccccagcccctgctgccccagcctgtgtctgttctcctcgagggctccagcatcctctgcttcccccaccacgttcccatcacccacctcattgatccactgaccaaatccttaaccctagcgatggcttgggagatggggggttggatagcatcctctttcttggcccttccttatcctaggaaaagagggttcctctccttgtgtgtgtctcttccccccacccctaattcttctgctctgtttgggaagacgtggaggaaaaggtgacttctgcccccaccgctcttacccccactgtagtggcctttggagatgcccccacctcccccccaccaactctcgcgtgttggagagaaggggccctcccagcacaaagttgcattcctcccccctaatttattctaatttattaactttgacccaccctttctgagcctgcagccttcccgtgtggcctgagggctgtcgagtgagctgccccagcccctcccagcccttgcccagcctgggggagtggggaaggcttgggcatggccccgttggaggttgatttgctgttttgtttcttgtctttgtgttctgtggtacttgctgagagaaaagaaaagtgagccaagcagaaggaggtgggaaaacggacccaaaccccagtgtgccctgccccatgcctttcctttagtggtgggaaacccttatcttgcaaagtgaatgtgtccccttccccaccctctagtgtatttcacagaaaacaaaacctcccaataaaacggttgaaacctgaatctctggatcttgatggttatctcccaaaagctgggtacctggcagggctttggctgcctgggttggggctctggcttagcttcactctggactgtaaaaggtggcattcttcaccagggaattcctcacccagagcacgctggggccaaattgacttaaagcttaaggctacccagtgagtcgatgctggcaccaggactgcagccctcagtgctcaatgcagggggagtgtggtggagggcgggtgtcaacgtggaggaagcagagggagcgggggtcctggcctctggcttgaaaggagagggcagaggggaccaggggccagcctcggatgggattctaagtgaagcagggagacgggtgccagttttcggcttaatgcgggggaactagggcagccaggggaccagcgttggggtcaccaggaggaattagagggaccggggcccagccttggctcgggttaacgtcgaggcagcgcgaggggctggggaattcagcctccggggtccacaggagccggcggcgggggctggggcgggagtccacgcaggaccaggggcggtctccggcggggcggggcgggcggtggtcacgctccgggccagctggcgcgcggcggggcggggcatccgtgcgtctcctggtggctgacgtcacggcgcgggcgtcagctgactgttcggccgccaccgccgctgccgctgccgctgtcgctgtcgccgccgccgccgcccgccgccgccgccgccgccgccgccgctgccatggctcaatacaagggcgccgcgagcgaggccggccgcgccatgcacctgatgaagaagcgggagaagcagcgcgagcagatggagcagatgaagcagcgcatcgcggaggtgc

SEQ ID NO: 44794 - DNA, 2300 bp, Homo sapien
cttggtgggctcttccctccctccacaggttccgtttagggggcccagccacaagaccccaggctctagaatctctgcccttgagcatcaggctaaagagtttagatttgtctttttttgttgttcttttcttttttttctttcttttttttttttttgagatgaggtctcactctgttgcccaggctagagtgcagtggtttgatcacggctcactgcagccccgacctcgcaggctcaagcgatcctcccacctcagccttctgagtagctggtactacaggtgcgccaccacacccggctgatttttttgagttttagtagagacgaggtcttgctatgttgcccatgctggtctccacctcctgggctcaagtgatccttctgcctcatcctccccaagtgttgggttgacaagcgtgagcctctgtgcccgccctaggcttgtcttctagatcgactgttctcaaggtatgcttgggggaccctgggcgtcggccatatcaaaatcatttttataataatgctatgatattcggcttccttttgttccagagatcaccacgaagaagagaaaactggggaagaacccagacgttgacacaagcttcttgcctgatcgagaccgtgaggtaaaggctgcctggccctgaccccggcctcgactccagccctggtggagacccttgcttagggagccaggctctgcgtgcaccctgagcagccctgggcctcacctgtctgcctgctccctctcccaggaggaggagaatcggcttcgggaagagctgcggcaggagtgggaagccaagcaggagaagatcaagagtgagtgtttgcggagtcagacgcgaggggcctgggcccaagccagcttccctgtccacagtctcctgggtggtgcgctgagccccaaggctgctctcagtggggctggagaccaagaggcagctctgccttgtaggtgaggagatcgagatcaccttcagctactgggatggctctgggcaccggcggacagtcaaggtaggcagcgtgcagcctgcttcctgctcaccatgggcccagcctccctcaggttccgtgggaaggaactgaccttcctgacttgggaagccccagggatcctgaggataactggctccagggcctggccccctgtctggggagtgaggcccaggcctggctgaggctctgcagcgtctggcagggccctctgggcctctgccttgttgagagcccttctgcaggcttccgccttcccttcccaactcctggattcccggatacagatgagaaagggcaacaccatgcagcagttcctgcagaaggcgctcgagatccttcggaaagacttcagtgagctgaggtgtgaggtgtgcgtgtgtgcacggtggtgtgtgtggcacctgtggctccagcctgggtgccagacacccagtgtgatgtgggcgctgtctgggcaagcaagcagcgtgctgggcactctcctcccaaaagagggggtcaggctcctcttcccttccctcccaccagagagctttgctgagagcggcctgccttggttccttagcccaaaggtggagggtgctgggcgccagtcctgtgctcactaaaccatggagcttccctcacagccaactggccgctgcttcccagccccagcatgggctctcctgggctggctgtctcctccctccctgggcaggggtgctgtcctcttgcccacgccctcctgccttcctccctcaggtccgcaggggtggagcagctcatgtacatcaaggaggacttgatcatccctcacgtgagtcccttcagccccagtacccgcagtgggtgcagcaccctgggctttggctcaggctggtgggggcagtgtgcgcaggcggggggtgtggggaggggccgagatggaccatcaagacgccgctttcctgcccttggctcccagcatcacagcttctacgacttcatcgtcaccaaggcacgggggaagagtggtgagtgccgccgacccagccgcccccatagcaccttgccgccgatgttgtcactggggcagcagcgggacattgggctgtcacttctcccctgcaggaccactcttcaactttgatgttcatgacgatgtgcggttgctcagtgacgccactgtggagaaggatgaggtacagcgtagggggccgtgtgagggggaacgggtgtccctgggctatggaggagaagccaagggaaggggaggtcagcaggcggccctgtgccctcttcctcccttagtcccatgcaggcaaggtggt

SEQ ID NO: 44795 - DNA, 2300 bp, Homo sapien
agagaaagagaacaggtaagcaggcagtgaagaaaagcacatctctgttggggacattgcaggaactggcttccatgctgacatgggaaccgcctgaatacatggcttctgctggacagtgaagatgagggaaaaaggtagcttccccttgttccagcccagctcaccttttttctttctttttttttttttttttgagacggcgtttctctcttgtcatccaggctggaatgcggtgccgtgatttcggctcactgcaacatccgcctcccgggttcaagcgattctcctgcttcagcctcctgagtagctgagataacaggcacctgccaccacgcccagctaatttttgtatttttagtagagacggggtttcaccatgttggtcaggctggtctcgaactcccgacctcaagtgatccacccgcctcagcctcccaaagtgctgggattacaggcatgagccactgcacccggcctccagctcacttttgacccagacttggtgttccctctgcctggaacactccctcccgcatcggaatggctgacttcttgtcatttggatgtcagcttaaatgtctccacgccacaaaggccagctcatcttgttctacattttgttttgtttgtttccctctctgttttctacacacacagcccccaggaacgaggcccgggtgagcaaagtgggtgaccacccctggcacacactgatccttggtgaccttatctggttccagagcatcaaatagcctactcagccaaacacagtggctcacacctgcaatcccagcaatttgggaggctgaggtggcaggatcacttgagcccagcagttcgagaccagcctgggcaacagagcaatatcccatctctacaaaaaaaatttttttttaattctgttccaattttcatgtacataaaaataaaaatagctgggcattgtggtgcacacctgtagtcccagctactcaggaggctgaggcgggaggatcacttgagcccaggaggtgggggctgcagcgagctgagattgcaccactgcactccagcctgggagacagagcaagacccagtctcaaaaaaaaaaaagaaagaggaaaggaaggagaggggaggggaggggagggaagaaagaaggaaggaaggaaggaagaaggaaggaaggagggaaggaaaagaaaagaaagaaaacattagtctactctcatctctattcctagtgacgccaggtggctacttcccggccacgctgaatgagacactgggcctctgcactatcgggcaccatcagatctccacatttgccaggaaggggaggccagacccagggctggggtgatcctggccagtgaggggctatcccctgccctttcttcttggcttcaggccaggggaggaaacagggagctgtcagctggccttcctcagcctcctggagccaggcctgcctgcctcagcttagccaagtggaacttggggaatcagctgctgaggtggcagagtaggggtcctggacctacccccgatctggatcctgccccaagggctgtctgagcagggctagctagggcagggcaggcaagtgtcgagcacagggcaccacagcagaacgactgtgctgggacggcccacagcaaggaaggcaggatgggttttcgtggccacaggacggccacgtcccctacgggaaactcaacaggagcccaagggcctgggagagaggcctggggaggaacccccttcccacccaccagagccaccaccgcccaaggacaggtgcccacggtcaagaagcacagtgccacaaagacacctcagggatggtggggctgccacggtgacagactccccaggcacgtatgacacgtccagaacaggtcaatccatggagacagaaagcacatgagagcctggtggggggatgtgaggggaggagcctgcctatggccacagggcctttggagggatgagaatgtcctggaagcagaccagggtgatgactacacaacatggcaaatgtgctaaatgccaccaaattgtacagttttaaatggtcaaaatgacaaatgaatttggtccgaacacaaatggtttctcacaatgcaggcgctccagctctgacacgtgcacttctttattggaaaagaataaagcagtcactgatgtggcaggggcaggacacgagcagctgccgtcctcctcccagcgtgcctggcatggtcgcaggggagcgggtgcctggagtcccggtgacaccacggggcacactgagggagctgaggagccggggccgc

SEQ ID NO: 44796 - DNA, 2300 bp, Homo sapien
agtagctgggattacagatgcccgccaccatgcccaactaatttttgtatttttagtagagacggggtttcatcacgttggtcaggctggtctcgaactcctgacctcaggcgatccgcctgccttggcctcccaaagtgctgggatgacagacatgagccaccgcgcctggcctgtgttacagtcttgaggcagaatttctgcttctccaggaaacctcgggttttgctcttaaagccatccaactaaatggatgaggcccacacacattatcaagggtgatctcttttacttaaagtcagttgagggccaggcatggtggctcatgcctataatctcagtgcttttttttttttagacagagtcttgctctatctcccaggctggagtgcaatggcacgatcttggctcactgcaacctccccctcccaggttcaagagattctcggccgggcgcggtggctcacgcctgtaatcccagcactttgggaggccgagatgggcggatcacaaggtcaggagatcgagaccatcctggctaacacggtgaaacctcgtctctaccaaaaatacaaaaaaattagccgggcgtggtggcgagtgcctgtagtcccagctacttgggaggctgagacaggagaatggcgtgaacccgggaggcggagcttgcagtgagccgaggtcacaccactgcactccagccttggcgacagagcaagactttgtctaaaaaaaaaaaaaaaaaaattctcctgcttcagcctcctgagtagctgggactacaggcatatgacaccatgtccggctaatttttgtattttttgtagagatggggttttgccatgttggccaggctggtctcgaactcctgacctcaggtgatccgctcacttcagccttccaaaatgctgggattacaggcttgagtcactgcacccagcatatgccagtactttggaaggctgaggcaggaggattacttaagcccaggagttcaagactagcctgggcagtgtagcaagaccctgtctctctctacaagaataggaaaagttagccaggcgtggtggcacttgcctgtggtcccagctacctgggaggctgaggcaggaggatcccttgagcccaggaagtcgaggctgcagtgagccatgatccaatgccgctacactgcagcctgggtgatagagcgcgacctcaacttggggggaaaaatctgtctatctatctatctctccatatatgtgtttaataaaaatgggcaaatgacttgaatagacatttcttcagagatcatatacaaaaggccagcaagcacatgaaaagatgctgaacaccattagtcatcagggaaatgaaaaagaaaaccttaacggggcgcggtggctcacacctgtagtcccagcactttgggaggctgaggcgggagcatcgtttgagcctggggcggtcgaggctgcagtgagctatgatctcaccactgcactccagcccgggtgacagagcgagaccctgtgtcaaaagaaaacaaaaaaagaaaaggaaaaagaaagcaagggaaggaagaaagccctcggttcagggtcgccggggaaggggctggtttggacggctgtcccgcaggccctccgggttagagaccgtcgggggcgtgtcttgagctggggacgcgactcctcggcgggggtgcacctgagaggccgggaccagcgaggccgcgccccggtggcaggtgaccccgggcgcgtctccgagcgccagggtggggcgaggcggacgcgcgccccaggcccgagggggtgtggcgcgggcgcgcgcgggttccggggtcgcccgaggcggcgggcggggagccggggcgcgggggaggcgcgcgccgcggacgcggccatcgagcgaagggggtcggctggccgggcgggtcccccttcaggtcgcgggggtcagggctgcgcgcgaggtccctggccccggggagcagcggccccgcctgcgtcccctgccgccgcgtccccctcggccgggcgtccccggacgcccccgccccgcgcggtggtacggtccgggtttaaaaggctccggcggcccccgggccagcccagtgtgtgggcggcggcggcggcggctgcgcgcttggggcccggggcgcggggcgaggccgtggggacgtgcgagcggggccgcggtggggctcgggggcgcgtccacgtggccagagggcggccacccggagccagcggagggacaggtaggtggccgtcatcgtcgccgtccgtgcggggccaaacagctcggggccc

SEQ ID NO: 44797 - DNA, 2300 bp, Homo sapien
gcgtcagcctctctggtagctgggaccgcaggcacacactgtcacagccggctaattttttttttttttttttttgagacagagttttgctcttgttgcccaggctggagtgcaatggtgcgatctgggctcaccacaacctccacctcccgggttcaagccattctcctgtctcagcctcccaaatagctgggataacaagctcctgccaccacaactggctaatttttgtatttttagtagagatggggtttcaccatgttggtcaggctggtctggaactcctgacctcaagtgatctgcctgccttggcctcccaaagtgctgggattacaggcatgagccactgcgcccagccccatgcaatttaaattagaaattaaaaagtcattctgcggtgtggtgaataggttgtagaggggaaagtgtaaaagagaatcagccaggaagctgttgagggaggtcaaggaaagatgctggcttccacagcagactagcagtggagagtgagaagtgggctgatgtggaacctatttcagagggaaacccaacaggatttgctgatatagttcagtgtttaatccttccttatgactgcaaaggaggaaaataggttgtccaaacatgacaaacactgttggaaattttatgtcactttatttattcattttttatttttattatttttctttttgagacagtctccctctgtcgcccaggctggagtgcagtggcgtgatgtcggctcaccacaacctccacctcccgggttcaagtgattcttctgtcccagcctcccgaatagctgggactacaggcgcacaccacgacacgcagctaatttttgttatttttagtagggccgggggtttcaccatgttggccaggatggtgttgaactcctgacttcaagtgatccacccgcctcggcctcccaaagtactgggattataggcgtgagccaccgtgcccggactgatgtcactttaaatactttttttttttattgtaaatgtcataaaagaccacttcggaaaaattggagggaaaacacaaaaaggaaattaaagtcacccaccatactattagcagagatcatgaggatttacctgacgctgtattgttctaggatttctctacatatgtacagtaagagactaagttggcattttcttttattttttgaggcggggtctggctctatcaaccaggctggagtgcggtggggcgatcacggctaactgcagcctctgcctcccgggctcaggctgtcctcccatctcagcctccctagtagctgggaccacaggtgtgcaccatcacacccagctaatttttgtattttttgtagaggcagggtttcactatgttgcccaggctggtgtcgaactcccgggctcaagcaatcaaccctcctcagcctccaagaagctatgactacaggcacgctccaccactcccagctaacttttaaaatttatttttgtattttttgtagagacggggtctcactatgttgcctgtgtttgtcttgaactcctgggctcaagtgatcctcctcccttggccttccaaagtgctgggattccaagcgggggccactttgcctggcctaaactggcattttcatactcatagttgtgcagtctgatttttcacgttatattagacctagacccaccgccagtactttcattcaaggccctgtcatttttcgcctccgtgcaggcctcctgctgacaggctcccccgctctgcacagcccacccgctctaaaatgcttcctctaaaatgcacatccgatgcttcacagtccatggtgaagccccgttggttgggcactggggttgagggcaagagcagtatccttgggggttacccgacccggccaccctccctctgcgaatcgcaacatggacgttgtgccacatctcctggggctcttgggtccaggtaagaaacggggcgggaagccgtccaggcaccgcagggcctcactggggcctccagggacaagggggaaggccccgccagcgcaggcgcgctaaggtcacaaggcgcgcttaggggcggagcctcgcggggtgcgcctctgggataggcgaccacggtgtcttcaaaagccccgtcagggttggcttcctggggccggaccgactgtgggtcagtttgcaccagcgctctggaatcgagttacgcgcgaaagggcagagtttctggaggaaaccgcagcctctcaaccgctgaccgggtctcagaaggcccccggcagggccgcttggcgggaactgaccacgcgc

SEQ ID NO: 44798 - DNA, 2300 bp, Homo sapien
atggctctgtgatggagtttgagtttcctgaggacagtgagggcatcatcgtgatctccagccagtacccaggccaggccaacaggacggcgcctggccccatgctcagggtcacctccctggacacagaggtgctgaccatcaagaacgtgagtgctataacctggggaggcgggggtggctttgtggtgagcatccactcaggcctggctgggctggccccactccacatccagctcgtggacgcccatgaggccccgcccacactgattgaggagcggagagacttctgcatcaaggtctcacctgctgaagacacgcctgccaccctcagcgccgacctggcccacttctcggaaaacccaatcctctacctgctcctgcctcttatctttgtcaacaagtgttcgtttgggtgcaaagtggaactcgaggttctgaaggggctcatgcagagcccccagcccatgctgctgggcctcctgggccagtttctggtcatgcccttgtacgctttcctcatggccaaggtcttcatgctgcccaaggccctggctctgggcctcatcatcacctgctcgtcgcctggcggcggggggagctacctcttcagcctccttcttggaggggacgtcaccctggccatctccatgactttcctctctacggtggctgccactggcttcttgcctctgtcttcggccatctacagccgcctgctcagcatccatgagacgctccacgtgcccatctccaagatcctggggaccctgctgttcattgccatccccatagccgtgggcgtgctgatcaagtccaagctccccaagttctcccagctgctgctgcaggtcgtcaagcccttcagctttgtgctcctcctgggcggcctcttcctggcctatcgcatgggggtcttcatcctggcaggcatccggctacccatcgtactggtgggtatcacggtgcccctggttggcctgttggtgggctactgcctagccacgtgtctgaagctgccagtggcccagcggcggacggtcagcattgaggtaggggtgcagaacagcctgctggccttggccatgctgcagctatccctccgccgccttcaagctgactatgcctcccaggcccccttcattgtggcgctgagcggcacctccgagatgctggccttggtcattggccacttcatctacagcagcctgttcccagttccctgaggcctctgggtcaagctttcatcagccccagcccccacactccaccaaagttctcatgcactatgcactcagaaaaatccaggcttattttttttactgattttttattctccagctttcagtgccaaagaggccatgctgagttaggtaggtgggcgctgcccagaaaatatatttcaataaaagagagaagcaagcttgggtcccttctactctttgccctttggggcctgggcgtgggggtagaaagagtgtgctgggtaagtgtggaccagggtggagggccagcttgggtgacacggtgacccctgcataggctttccctatcagccctccccgggggtgtccccactctgggagaggtgggaggatgagggcagaggcgtagcccccctgccccctctcaagctcagtggagcgtttcgcagccagaccagaaaggaggaggtaggaagccaccagacagggagcgggggcgggccgtctgtgggtatgcagggccaggcgccgccagcagtcctggcgcgtggggtgggccaggcagtccgcgggggcgagcgtaccttctggccctcccttctccatgtcccagctcccagatgacgccaacctggcccgactggttcctgctcccaactcccccgcgtcgttgctttgggaggggtccgccggccagggcggtcgatgcgcgcgtgctaggcgggaccccggggggactcctcccggggcgcaattgggccggggggcggggccggggcgcggacggggcaggagggcggggccgggaagcgcgggcggcgggcgcgcccctctcgctgcttccggcggcggcgggcggttccagcgcgcgcccggggcggcggcgcgcggcggggggtggttggggtgcgcgccggcccgagtggacgccgtcgcgaccgccatgcagctgacggtgaaggcgctgcagggccgcgagtgcagcctgcaggtagggtccccgggccgggccgccgggtccggcgcgctctctcgcccgctcctggcagggggaccggcagggccgagggcgggcacggggaggccgggccgagg

SEQ ID NO: 44799 - DNA, 2300 bp, Homo sapien
catccacacatcaaacccttgtaacaaccctcagcatatgtatatttgctcatattatacgcacatactaacttgaactttgtaaaacacacacaaaaatcaatttttttttttttgagatgggagtctcactctgttgcccaggctggaggagagtggcgcgatctcggctcactgcaacctccccccacccggggttcaagagattgtcctgcctcagcctcccaaatagctgggactacaggcgcccaccaccacgcccggctaatttgtttgtatttttagtagagacggggtctcaccgtgttagccaggatggtctcaatctcctgacctcgtgatccgcccgcctcggcctcccaaagtgctaggattacaggcattagccaccgcacccggccaaaaaaactttttaagctgggcatggtggcatgctcctgtagtcccagctacttgggatactgaggtgggaagatcgcttgagcccaggggttcgaggctgcagtgattatgatggcactactgcattccagcctgggtaacagagcgagaccctgtctctaaataaataaataaagttttaaaataaatttaaatgtcaataaatttattaaaagtatattatttggctgggcacggtggctcacacctgtaatcccagcacttagggaggctgaggcgggtggatcgtttgaggtcacgaatttgagaccagcctggccaacatggcaaaccctgtctctactaaaaaatataaaaattagccgggtggtagtggcgcacgcctgtaatcccagctactcaggaggctgaggcaggagaatcgcttgaatccgggaggcggaggttgcagtcagccgagcttgtgccactgcactccagcctaggcgacagagcgagaccctgtctcaaaaataaataaataagtaataaaaacaaatgtatatcattcatttgaaacattagagacgtgggtggttttgttctgttctgtttccacatctgcaaccatgcgtcttgtgcacctacccggggcaaatacctccgactccatcacagtcttgacaagaggttgaagtgtgcagattgattccagttgcaccaataagctttgggaacatatgatcccccccccccaactctgtactgtcttctgtactgccttccgaccttctttctacacattcccatcatatttttccccaactttctgccttctttctcttcctttaccacaaagcctctgcaccttgctagtggcgccaaagtttggaaaagcagacaagtccacttaatgttccacagtatagaaactggcctacgccgggcgcagtggctcacgcctgtaatcccagaactttgcgaggccgaggcgggtggctcacgaggtcaggagttcgagacctacctggccaacatggtgaaaccccgtctctactaaaaatacaaaaattagccgggcgcgggggcggacgcctgtaatcttagctacgcgggaggcttagagaggagaatggattgaacccgggaggcggaggttgcagggaggcggaggttgcagtgagccgagatcgcgccactgcactccgggctgggtgacagagcaagactcagtctcagaaaataaatacataaaatagaaataggcgctcggtcaatacttgaacgaaaggaggaactccgcacagagcctggcgtccaggtcggtcaaactcaaccctggggccccagggctgggcaccttgagcggcaacgtggccaaaaccctaaccccgggcacccagccctgctaacgtctaaccctctgtcccattgcctttagaggtcgcagcgtaatcgggaatgcctggggctccctcccagagcgggtcgccccagcgatcacaacagcttcagatgcgctgccaagcgattggtccaggcagcgccaagcgccgaccagctcacccgcaccgcgcccgcgccggcgcgtcactcccagagacgtcacaaccggtcggagcccagcgagcagccggagttgagctggacgctgaggggggggcggggccctgacgcgcggggcggggaagggaggggcttcggtggggcggggccctgacaggccgagctcgcgggcgactgcctgccaggcagacgctgcagctaagctgcgcggtggctgtggcaggtgagagcctccggaagggaggcggcctctggccccgaccctgctccgcgatcgcccactcgggcgcccggccgggcctggcagggaagggccgccgccgccgccgcgcgtttgcgaggcctggcggggc

SEQ ID NO: 44800 - DNA, 2300 bp, Homo sapien
agtagctgggattacaggtgcgcgccaccatgcccggctaatttttgtattttctgtagaggcagggtttcaccatctttgtcaggctggtctcgaacacctgacctcatgatctacccgcctcggcctcctaaagttctgggattacaggcgtgagccactgcgcccggccgggactggtcttaaaagggagtagggacccttctccctcagaacaggaggaaagcaggggcaggtggatgcccaaatatattggtggtttcagaggcaggaagttgagggggttcttggaaagagggctggagcccttctcgagcagagagttctggaaggccccctcccagacccgccagggaaaaccaaacccagcagccttgggatttgaactcaatttcctccttccacctgccagggagctcaagtctccctttcagccctggtagaaggcaacaggtctccacctccttgtcctccagccacttcttcccaagtggcaggggagatccagtcatgcaaggctatggggtcattctggggttcgctggtatctgaggtgaccccaccctgtgtctatcctgcctccaggccctctccgcattgtggtcctagtcgtcagtgtgggtgtcacatggatcgtggtcagcatcctcctgggtgggcctggcagtggctttcctcgcatccagcaactcttcaccagtgagtgtgggaccccgccttatccttctctggaggccaccaaggtggccacctgggcctgtggttgaggctctgggttgggagttgacttgggttttctatctcctccctggcaggctacctttggctgtccccagtctgtctcctggcatcaggcgcagcctcccccaacacccagttgcttcatctaggaaagccaatacctgatcactagaattatatgcccaactggagtcagtagggccagagtaaggggtagggagcttccactgaacatggggagtgatgccccggttgctccctgcaggctctgagatggagaggggactctccaccttgttgactggtaataggtcacctgagtacttttttgtttgtttgtttgagacagtgtctcactttgtctcccaggctggagtgcagtggtgcaatctcggttcactgcaacctctacctcctgggttcaagcgattctagtgccccagcctcccgagtagctgagactacaggtgcgcaccaccaaacccggcttcttcttcttcttcttcttcttcttcttcttcttcttcttattattattattattgtatttttagtagagatggggtttcaccatgttgcccaggctggtctcaaactcctgggctcaagcaatctacccgcctcagcctcccaaagtgctacaggcatgagccactatgcccggccaggtcatctaagtagtttttctaattccatttccccctgttcctagagtagggagtttttcatctgaacatgacttacacttgagcaggaagcatgccaaggtcggcctggcttagcccccggcccctgagcctgactgcctgtgtctacacttcgcggtgtaaggagggccaggctgccctgccgcaggccccgggaggctccacactaacagaaaccactctgtatccacaggtccagagagctcggtgactgcaggtaaggcccctgtcacctccctgctcctcccctttgtgacatccctgcctgcccccggtcccgtagggcttcggttttccatttattcctccccaaaccagctgtggtggtccacgggggctgcttgccactgtcaacctacaaaacaagttacttcctgccaagttacttcctgccagaatatgacggtggggcaggcctaggatagatactcccactgcaaaagggcaacttggaaggaaaaaagaggtcacccgtcccaagcaagtccaaagcccagcagggcaaaattcatttggtttcaaggcctgaggggaatcctctgtggcctgagattctttcttctgggcctgctggaatgacccatgctctgaaacgagacagccccaccttcggggccacccttccttccctttatctcatctctgcccccttcactccaggccggcagtgtttctgctggtgtcagattctcaagagccttgttggtctcttttgcaagttatagaggcccaagctataaaatcagagagttttcccacagacgcttcctagataaccccatcttcattgtagatttctgctgaaagggttgagtggacccacgagtcacatacctcagctctggggcaaac

SEQ ID NO: 44801 - DNA, 2300 bp, Homo sapien
cggccctctgtttttgtttctatcccttatgcattctccccggcaggtgcccctcccagctttaagtgtatgtatactctggatttttccgtcttcagaacagtgctcaaaaatacctggggtgtccttctaacagaaagtgcagagacgtctgctgcaggattgcccacccccattttgtaacatctgctatttgagaactgctgaagctgccctgatctatgagggctgacctggaagaacagatgactgtgagtgtaccccaggacgttggcctggatggtgacagaccatgtgctctagtcaccgtgctggccagacccccacaggaatccaaaccatcccagagaaaataagggacttttgcaaggctgccccaggaagcacggaagacgtggaactgaatcccaggcctctggcccatcacccacgtggtgtccccaaggaagggagagttgtctcggaatgctcagggggactcattaaagcaacactttcataaatgcctgctctgaacaacatgtaaatattgtctttgaaaaacaccggctggcagctcaagggtgtgagtaacctggagcttcttcgactgggcccccctgaggagggcatggagcccaagattcgttaccataattacttgagaggctgtcaaattccatgacaaaacgcaaatgcaaagccctggccccagcagcaggcagctgaaagggaccttgaccctgttgagtactccagtatagaagctgctggattctaaccagggctctcccatgcccggctctataaactttctctatattttgcattgtttccctaagggtaggagattcccgtaagttgggtcaaagggcagggaggtttccgtggttctcattgggccctgctgctgctctccagacagatgatggatcagctgtcagggtggccccggccatgccagcgcagtaggtggtcagggcgcacttggggcagccggcagggcagaagggacgggagcttgacccgtgttctcatgggcagagggagcccgggcagtgttgggggcagcgtgcgggcaggcgcggaggggagatagccaggcagtcagggagaattggggtgactggagaaaggccgaagggccgcgtctgcctgcggccggagaccaccccaggtccatacagccagctgggtgccgggcaccgcttggagccgctgggaaagccaagcaccgctctttctggagccttcttttttcctattgttagggaattcacgacgtcacacttgttttcaagtgaaaataagagttgtgtaggacgcgaaagtcacgtgacttgaaagctgaacctgagaggcctcaaaataaattctggtttgctgtgaaagcctcgggttatagcgctaaactcccccctccactgcccccgaaagttgtattctcctctgcttttagggtggggtgtggcgtaaacaacacagcttgagcagctctgaggaggagggtgttagagaccaggcaggcggagcaggcaagagttttcaaggatgtcgaaatagtttgagacgccccgtcccattataaaagtgataacgagagacagcaggaacgcgcttctggacagaaaacagaccctaaggaaaggcagccagaggctcacgctggatcctgcggtcttccctatctgcgcctctgtacctcccttgcctttacaaagcgcatggatcaactttggaacaggttctaattctgccccagatccatctgcgtcttcccacgactcacaaatctgacctcagggtgcaagcgcagccccagccctctaagcctgggtaggcagggctctcccacccgagaaagggccgaggggagacttccggggcgggaccgacgtgggcccctcccactcggcggccggtgggttcagcctgaacgcaccgcggaggtggggccgacgagggatccaggggcgggacaggttcggggcgggacaggttcaggcccctcccatgcggcggccagcgcgagcggtagaggcgggtctggaggcggggcctgcgtggagccagacggcgcagctgctgccgggggcggggccggcgggctgtggccccgcccttagccgccattgccgggcctgcctggccaccctgcgcagcggccttgcgtcctctccgggggcggagcgggtcggcgggcctgacagggaacctccctgaccgagcccacgtctccccacggccagagaaatctccggcccggcccgcatcgccagcccccaggcccggaggaacggcccgagcccaggagaaccaca

SEQ ID NO: 44802 - DNA, 2300 bp, Homo sapien
cagcctggcaaacatggtgaaaccccgtctctactaaaaatacaggccaggcgcggtggctcatgcctgtaatcctagcactttgggaggttgaggtgggtggatcacgaggtcaggagattgagaccatcctggccaacatggtgagaccccgtttctactaaaatacaaaaaattagctggatgtggtggtgcgcgcctgtagtcccagctactcgggaggctgaggcaggggaattgcttgaacctcgcaggtggagattgcagtgagccaagattgcgccactgtactccagcctggtgaaagagcaagactccatctcaaaaaaaagaaaaaacaaaaattagctggatgtggtggcaggcacctggaatcccagctactcaggaggctaaggcaggagaatcacttgaatccaggagacggaggttgcagtgagccaagattgcgccaccaaactccagcctgggtgacagcaagactccatgtcacgaaaaaaaaaaaaaaaaaaacacatgctcttcgaagcaatcaggcactgcaaccatggatgggtccatttctacaaaccattacagaatgggggccatgccaccaggtcaaacgccctcacccagagccaggcagttaggaagccaccacagggcttccaggagggcaactgctatggtgtgggtgccttgtgtgcttgcgctcttcaggggccctgctccacttctgatgctcctcaggtgagctcggtgccaggactacagcgacacggacctctcactgctgcacccttcaaagtccagcagacaacccctcgccctggggtaggagctcctctactcagctcctcacagcacctgccatcagtggggctggggaggggaacgttgcccatgtcacatcaactcacggctggccccacacagaaagggtcagcttactgggaactaactggaccctgaaataaacggaaagaaccacagcctgcaaatacctctaagcctcactcaaagcaggtcatgtttgctcatgaccaaattccggaagactgggaggcatcgggacagactccagaaaggtactggtggcaggggactggtctgctgagtcacagcaaccccacgctccaggccgtttgttcctgctgctccctttgggattaactagagattgaaccggctcaccttgtttcagctcaggccctgcaaccgaccgaccgtctgctgggctccaagtcacctgagaggcgaggtgaggtaagacggacagtaggggtggggtaaggcaggccgctctctcccatggtgacagggagctaagctgagctgagccggactgagctgctctcctcaggactcaggggtagccctgccctcccagctggctgcgatgctctagtgggactttctggaggaacaaacatgggaagacatcgggaaacctgacagcttggtcaagagtctactcgtgccatgtgggtgggggcaattcaaggggtccttagtgaaaagcagttgggagcttctcatcttccccacgccctcctctttcctgaggaccacagcaggggagggatctgcccaaggacacaaggtgacttagtagaagcagggcatgatgaagatctctagccaccaacatctggctaggccagggcaaagggacctgggccatgacctgtctgttttataaaccgaaatcgctgcagcccttgtcttggcatgagggtttcatggtagagcacgatgcctgctggagggccagcgggggtgggccatcccatccccaagggtcactggggttaaggacctgcccagactccctgggtggagccctgggccttggcaggggcccagctggttcctggccactggggccagagaacctgggggctgctgagttagttcagctgaaaaaccaacaaaagggcctccctgctatacccgggggctcatgagtcaccggggctttgggggagtgccaacatcatcatgacacagcaagaatcttatcagaccaatggggaagtcagcccagaaatgttctgaggaaaggggaggcgggggccgctgggtcatccctcccacaggcccatcattgggatgcgtcctgaacgcccatcaagcccatggcccttgtgatccaggtggggaaactaaggcccagagaagtgaggaccccgcagactatcaatcccagtctcttcccctcactccctgtgaagctctccagcatcatcgaggtcccatcaggtggggaaagatgctgttccaggcgcacactagtctacaaggccagagctttctgg

SEQ ID NO: 44803 - DNA, 2300 bp, Homo sapien
acattcagcggctaggcacagggttcagaaacgtcctgcagccgggcgtggtggctcatgcctgtcatcccagcactttgggaggccgaggcgggcggatcacttgaggtcaggagtttgagaccagcctggtcaacatggtgaaactccgtctctactaacaatacaaaaattagccgggtgtggtggtgcatgcctgtaatctcagctacttggggggctgaggcaggagaatcgcttgaacccaggaggccgaggttgcagtgagccaagatggcgccactgcaccccatcctgggcgaccagagcaaaactccgtctccaaaaaaaaaaaaaaaaaaaagtcttgcaagtgcatatgcacaccaggtagagccgggatgatcctggcgcactagcaggagcgggaggaggagctcaacttagcagagcctgtggggccctgcaacaattagttggaaaagctgaggcatggagcaggcacttcctggcttttaagattggggcctgggagatactcaccgatgcacccatgatgatgaatatgtgtgtatccgactgatggaaggcatcgccctggaaaagctcttcccgcaggatcccgcacacctgggtccggctcagggccacctgctctgccatgacgctgtctggtggaagaaaggctcgttaacaaggcagaagaacaggagagcattgagaagttagcccctttcttgagagttcctctggggtctcacaccagggtgacacctgattgcccaaatcactccttgtgaacggctgggcattggggagtggttgatgggttagaaactgctggctctgggctccagccactctctcctaggcagccttcattcagggtgtacattacaaaattactcaaagcattggtgtattccgactacagcatcaattctggacaaccgagtaaaatccttgtggggcatggaactgcgtgcccaggaccatctcattcccgactgtagcgggaactccacaatgacctggagcatgggagatggtgcagatgctggagttcagctccagccctccccttgccaagctgggtgaccccggtcggcaagtccccttcgctctcggggtctcaggggctcaagagaggaggtgcggggtataaagggattggttaagaccctctcgattctgctcggttctcaagcacaacaaacagcgtgtattttaccgccgcgcggcgcagcgcgggacagtacgctcctccgcctgcgcggcgcccgcccggccggttacctgcgcttcgtcgtcgtcgccctccgcgctcgcagccccgaagtgtacgaccgtttccgggggctgagccccgccggcccatttaatcggcgggggcgggggcgggcgcctgggctgagcggacccgcctcaggcgaggcgtgcggggcggggcctcggccaccacccctcgtgcgggcggggcggggcgagggcaggtgcgcgcgcatcccaggccagcccctgcctctcgggcacctgcgctggaggccggcccgccggctgcctgccatacccgctgccgctgctctgcatccccaattccggcgggcacgggtgcagctccgcgtagtgctcccgaatccccatcgccggccaggccccgcccctactgtccggtttccccgcctgccccggcggcctcgcgcgctcgcggagggctccacttccgccggcagcgtggccacgcctcctctgggctgtccctcggctcctgggcggggccttctgccgcgccactcccccgggaaccctcgcctgttcgcgggtcaagccggccctattgggcagtctcttcttgattcctcccccggagagggcggggcggccgagcgccccgaggctagacgccgccgtccgagagacgagggggcgtgtaggcggtgacgccctgcaaagtggccggcgtgcttatcattaccgagcttccgcgggcctgcagagcctggcggactcagacttctctccggagcgggatgcggccctaccgcggcctcacacttctcgccggcttcccgagttctcgggggcggggcttgtgtttttacttccggatcccacagctatgacaccggaagccggaagcgtggtagggaagggcgaccgcgaaactgggactttctcggagcgccggggccctaccagcgttcacagtccgccgctcccacccttctcacgtctgacggactctgctgacaggtgtggtccttttccccaaagacagggttccatccgtgggcgttccgccgcctccgaaacttcccccg

SEQ ID NO: 44804 - DNA, 2300 bp, Homo sapien
atcgcttgaacccaggaggccgaggttgcagtgagccaagatggcgccactgcaccccatcctgggcgaccagagcaaaactccgtctccaaaaaaaaaaaaaaaaaaaagtcttgcaagtgcatatgcacaccaggtagagccgggatgatcctggcgcactagcaggagcgggaggaggagctcaacttagcagagcctgtggggccctgcaacaattagttggaaaagctgaggcatggagcaggcacttcctggcttttaagattggggcctgggagatactcaccgatgcacccatgatgatgaatatgtgtgtatccgactgatggaaggcatcgccctggaaaagctcttcccgcaggatcccgcacacctgggtccggctcagggccacctgctctgccatgacgctgtctggtggaagaaaggctcgttaacaaggcagaagaacaggagagcattgagaagttagcccctttcttgagagttcctctggggtctcacaccagggtgacacctgattgcccaaatcactccttgtgaacggctgggcattggggagtggttgatgggttagaaactgctggctctgggctccagccactctctcctaggcagccttcattcagggtgtacattacaaaattactcaaagcattggtgtattccgactacagcatcaattctggacaaccgagtaaaatccttgtggggcatggaactgcgtgcccaggaccatctcattcccgactgtagcgggaactccacaatgacctggagcatgggagatggtgcagatgctggagttcagctccagccctccccttgccaagctgggtgaccccggtcggcaagtccccttcgctctcggggtctcaggggctcaagagaggaggtgcggggtataaagggattggttaagaccctctcgattctgctcggttctcaagcacaacaaacagcgtgtattttaccgccgcgcggcgcagcgcgggacagtacgctcctccgcctgcgcggcgcccgcccggccggttacctgcgcttcgtcgtcgtcgccctccgcgctcgcagccccgaagtgtacgaccgtttccgggggctgagccccgccggcccatttaatcggcgggggcgggggcgggcgcctgggctgagcggacccgcctcaggcgaggcgtgcggggcggggcctcggccaccacccctcgtgcgggcggggcggggcgagggcaggtgcgcgcgcatcccaggccagcccctgcctctcgggcacctgcgctggaggccggcccgccggctgcctgccatacccgctgccgctgctctgcatccccaattccggcgggcacgggtgcagctccgcgtagtgctcccgaatccccatcgccggccaggccccgcccctactgtccggtttccccgcctgccccggcggcctcgcgcgctcgcggagggctccacttccgccggcagcgtggccacgcctcctctgggctgtccctcggctcctgggcggggccttctgccgcgccactcccccgggaaccctcgcctgttcgcgggtcaagccggccctattgggcagtctcttcttgattcctcccccggagagggcggggcggccgagcgccccgaggctagacgccgccgtccgagagacgagggggcgtgtaggcggtgacgccctgcaaagtggccggcgtgcttatcattaccgagcttccgcgggcctgcagagcctggcggactcagacttctctccggagcgggatgcggccctaccgcggcctcacacttctcgccggcttcccgagttctcgggggcggggcttgtgtttttacttccggatcccacagctatgacaccggaagccggaagcgtggtagggaagggcgaccgcgaaactgggactttctcggagcgccggggccctaccagcgttcacagtccgccgctcccacccttctcacgtctgacggactctgctgacaggtgtggtccttttccccaaagacagggttccatccgtgggcgttccgccgcctccgaaacttcccccggacgttcaggctcccccctcttttttgggccccagcccgttcctgctccgcgcttctggagcactggccaaggcgggccgattcaggacccaggttacttgggcggcgagctggactgtttctactcctccctcctcctccactgcggggtctgaccctactccttgtgtgaggactcctctagttcagagacatattctgttcaccaaacttgactgcgctctatcgaggtc

SEQ ID NO: 44805 - DNA, 2300 bp, Homo sapien
ggttgcggtgagccaagatcgtgccactgcactccattctgggcgacagagtgagactgggtctcaaaaaaagaggccgggcgcggtggctcatgcctgtaatcccagcactttgggaggccgaggcgggcggatgacaaggtcaagagatcaagaccatcctggccaacatgatgaaaccccatctctactaaaaatacaaaaattagctgggcgtggtggtgcacaactgtagtcccagcggctgaggcagaagaatcgcttgaatccaggaggcggaagttgcagtgggtggagatcacaccactgcactccagcctggtgacagagcgagattctgtctcaaaaaaaaaaaaaaaagaaagaaagaaagaaaaagaaataaaataataatgggagaggattgcgagggatataaacaaaattagtcagaagttgataccttcaattgttgaagttggtagctgtgaatgtaagatttactatactggccgagcgcagtggctcacacctgtaatcccagcactttgggagtctgaggcaggcagatcacctgaggtcaggagttcaagaccagactggccaacatatagtgaaaccccgtctctactaaaaatacaaaaattagctgggcgtagtggcgcacgcctgcagtcccagctacctgggaagctgaggcaggagaatcgcttgaacccaggaggaggaggttagagtgagctgagatcatgccactgcactccagcctgggcgacagagcgagactccatctctcaaaaacaaacaaaccaaaaagatttactatactcatttttctactttcgtacatttttgaaatttccaataataaaatgctcaaagcactgtctctgagctggattactgcaattacctcttaccacgccacccttcttttacccttgcccactatggtctgttctccccaccactgctagaacgatcagtgtaagacgtaattccgatcacattcctcctctactgagaaccctaccatggatccccgttgccttctgcgtaaaagccaatctccctacaacggcctacaaggccctgtaccatcgggttccccatcccttcctctccaactgtgctcccctccctcactctgctccagctatagtgacctccgtgctattcctctaatgtgccaggagagcccattcattctcagatcacagaaacagtatgacgataggcagatgttgtcttgcaaaacgagcaaacaggcatatgaaatcagatacctagctgccaaactatatgtgaggcatttccgaagaatttaacgacctcgatagagcgcagtcaagtttggtgaacagaatatgtctctgaactagaggagtcctcacacaaggagtagggtcagaccccgcagtggaggaggagggaggagtagaaacagtccagctcgccgcccaagtaacctgggtcctgaatcggcccgccttggccagtgctccagaagcgcggagcaggaacgggctggggcccaaaaaagaggggggagcctgaacgtccgggggaagtttcggaggcggcggaacgcccacggatggaaccctgtctttggggaaaaggaccacacctgtcagcagagtccgtcagacgtgagaagggtgggagcggcggactgtgaacgctggtagggccccggcgctccgagaaagtcccagtttcgcggtcgcccttccctaccacgcttccggcttccggtgtcatagctgtgggatccggaagtaaaaacacaagccccgcccccgagaactcgggaagccggcgagaagtgtgaggccgcggtagggccgcatcccgctccggagagaagtctgagtccgccaggctctgcaggcccgcggaagctcggtaatgataagcacgccggccactttgcagggcgtcaccgcctacacgccccctcgtctctcggacggcggcgtctagcctcggggcgctcggccgccccgccctctccgggggaggaatcaagaagagactgcccaatagggccggcttgacccgcgaacaggcgagggttcccgggggagtggcgcggcagaaggccccgcccaggagccgagggacagcccagaggaggcgtggccacgctgccggcggaagtggagccctccgcgagcgcgcgaggccgccggggcaggcggggaaaccggacagtaggggcggggcctggccggcgatggggattcgggagcactacgcggagctgcacccgtgcccgccggaattggggatgcagagcagcggcagcgggtatggca

SEQ ID NO: 44806 - DNA, 2300 bp, Homo sapien
tataaaactctgccgtaatgtaataggtagtttccaagaaatccaatcacatacaatgtgaaaatgtgttactgtggggttaatgaaatgaatgaggcaagcccgctggaccatccaaatctgtcctgctcccggctggagtttgatgccatctagtggcagacgttgctctggctgaaatattgatggagatttccggtccagtggctggctgagacttccaggacagtggcagtatctccaggaatctctcaatcagttaggacttcctttcttgacttgatctgaggataataggccgggaaaataatggggacccggagaccctccctctgtcttcctgcttcctaagacagggtcacatgcactttactctcccttccctgacctgttgaaggtaagaactttagcctgcctctgtctgagaatggggagactgagcagaggacgacaggaaggatggcaatcactaaccgggttatgtctgattttcagctattccaggtgttaacaagttgtgttctctggtttttaaaattcatcatttaatgaaatatatgtaatgaaatacagcagtgaaaataataaactggaggtacacgcaagagcttgggtgaatttttcttttctgtaagtaaaaacatttttaactgatgtatgataactctgcatatttatgggatacatgtgatattctgatacatgcacacgcacacacgatgtaatgatcaagtcggggtatttaggatctccaccacctcaagcatttatcatttctttttttggggaacatttcctatcttttagctattttgaaatatacaataaataattacctatagtccctctacggtgctatcaaacactagaacttaatccttctatgcaactatatgtttgtccccattaacctccccaccctccccacctttcccagcgtctggtaaccatcattctgctctacctccaaaagatcaacgtttttagtttccacatgagtgccaatatgcttttcccaggtgcagaggctgctgattcctggatttggaaggtgggggagagtggtttggatttcagtacctcccccttcctcagggctaggccctgtctggtcacctcctgttgctacaggtgtgcctggcacagacattcagctcccggggccgtgccgccctcacccctgcatgcctctagaggtacctgtcccgtggatttgacccccttccagacacacaaatagatcaccactgagcagacacagggtcacctcccagctccctaccaggcaagagcgaccagggcagggactgatactgccgaacccaggagccaggcccgacccagcctcaggtccagcaggtcccgcctgtccacctgggccaggcctagagcccgggagcccctggctggtgggaggccacccgcaacccaccccacacgcagctccagctcccccaccaggcggggcgactaggacagggacagaacccgttgaacccaggagtgagatccggccccgggtcccgctgggccctcccgtccaccttggctggacctggcgcctgggagaccttggctggcgcgaggccacgcccaccagacatgcagttccagctaccccaccagctgggcgaccaggacagggacggaggctgctgagcccagttagaggcctgccccccggggtctgtcctgggcgctcccccaaggacggacagggcaggcagggtccgggacgatggccgcacagtcccggccccgtgttcccaggcccgtcttgctcctcgatgtgagggagacccgggggatgggacaggctgggccccgcagtgcctgactccctgcagggctcccgggacaggggtccggcggacagccggctgctcaggggtgaggggtccaagctggcattgcggccaccttccggcccgggctctcttggggaggggcggggttggtgagaaccggtcacgtgctccggggctcactcggggtctcccagggccggaagtagggcccctgtgcgcaggcgccctgaggatcccgggctgcccatctcacgccagggggcggaacttcctgcagcctctctgcctccgcatcctcgtgggccctgaccttctctctgagagccgggcagaggctccggagccatgcaggccgaaggccggggcacagggggttcgacgggcgatgctgatggcccaggaggccctggcattcctgatggcccagggggcaatgctggcggcccaggagaggcgggtgccacgggcggcagaggtccccggggcgcaggg

SEQ ID NO: 44807 - DNA, 2300 bp, Homo sapien; identical to SEQ ID NO: 44806

SEQ ID NO: 44808 - DNA, 2300 bp, Homo sapien
agccgcttgcgggttgccccgggcttgcggatggcaggagtgggccgctggggagaaagcagtgctgacaggaagtggctttttatcctgcagcagatggctgaggacaaggcctctgtgaaagcccaggtgacgtccttgctcggggagctgcaggagagccagagtcgcttggaggctgccactaaggaatgccaggctctggagggtcggtgagtcgggggagccggctccggagaccccttccagggtttccaaaagcaatgaggtgggtttaggggcctccagggtgctccttgatgaggatagaccggggcaggctgcgtaaacacgtcggggcagacgtcgggagaggtctgggccaggcatccgggacctgggtcccagccggctctccgcactctgtgaccctttgatggagtttggattatttccttaggaggcattctgggggccccgagcccacacccacagtgtctagttctctggaaggacttctgggaccggcgcacagtcgccctcgtggctgaggttgatgacagggaaaaaggcacagggcaggagccgccagggcaggagccgtggggggagttggagaagccctgtcccagcctcccgctgccctgcgagcggcacagtgagaagcgcctcccacacgggccgtgttcctgcccagggatgcccgctagagactcagcgccctgggtgtttactgggggcaggtcctgtcagcgccctctgccaggcaggtacctaaatccccgactcccagcagcagagcgggtgctcacgtcaaccacgttcttcctacaaatggcctaggtgcagggaccgacctgaccactagagaaagtgtcactgtggcaagggaacttcaccagccaagggccaaccttgccagccggtggcctcaggcctgctggttactctcttttgcaaaggggtcttggttcttgtgagtgggaccattgggtcaaagggcagggaggtttctgtggttctcattcggtcctgcttctgccctccagacagatggatcagctgccaggggggccccagccatcccagcacagtaggcggtcaaggtgcacttggggcagccagcagggcagaggggaggggagcttgacccaggctctgatgggcagagggaacccgtgcagggtgtgggggcagtatgcaggcaggcgcggaggggagagccaagcagccaggcctgccaggcagagttggggtgactggagaagggccgtgtctgcctgtggccagaggccacccaggacctggacagatgcacccaccattgtccctgcagtgaggctgtggaagggcttggtgtggtgggatgaggccagaccctggaaactggaggttaagggagctgtaggggggcaggtgtgggaactgagcatccgagcaggtcgtctgggactccagcagagctctgggcagcagcagggatggggccgaggcccggtctgcattgagctcagtgcttgcacgcccaggtgggcagtctctcatttttggaacagcagtctctcctgaccccctccactgagactgcttttgctggggcccccagcagtcccccagtggaactccacgggcagttccgagggctcctctcacctggccccagcactgcgggatgcaggcgaccccatccttttctcggaccacccccttcccctggcttccaggtctccttgccatctgtacttggtcacctgctgggcccctgcattgaagcaaacacgtcttaagcaaagctcctcacctgctgctcccacctggccccctgcagttgtcctcgtgtctgttgacggtgcctccaccctgccgcctggcatcagctcgcagtcacagggtgttcagagccgacccccaccccccgcccacgccctgcgcatagcccctgccgtccccccgttcgtcctccctgagtctgctctttccccgtgccagggcccgggcggccagcgagcaggcgcggcagctggagagtgagcgcgaggcgctgcagcagcagcacagcgtgcaggtggaccagctgcgcatgcagggccagagcgtggaggccgcgctccgcatggagcgccaggccgcctcggaggagaagtgagtcagcgggggcggggccgcaccgcagggtctgtggttctacacttgatcttagccgaaaggctgagaagtgtcgggtccatggttctttctgccttctgaggactccttcagattctgcctgtggctgtgggcccattctgtcccttagccttgctaacggtagaggcgaccat

SEQ ID NO: 44809 - DNA, 2300 bp, Homo sapien
cctgctaaggagctctttccagttttctagacacctgtggaatcccttcacccacccttacccatcggtgtggctgctctccagctcactctcgtcctgctctccccaactgcctcggctccggggggacgaggctttccctgggctgctgccttccctgcccccttcccagtccccagaagggtgccagcctcagaggcctccagagcagagccttgctcaccgcagcagctccagctggaggaggttccccctgcctcctgcaccctgaccccttcttagagcagcagaggcagaagcaggagcctgctttggaaaatgacatgtttttattgctatgtctgcagtggctttttagcacagtagaatgtccccgcaggcccgccaccctcacccagccccagccctgcagcctctgtctgggtgtcggggaagcctttcttggggtcactcagccgtctgaggactggatgtggcacagacatacataggttaaagctgctacacggaagactggagatgcgggaagtgcattcgctttaagcctagaggtggtagccgtgtccggggtcccttcctgggggtgtgcctgttaccgaaataccaagggtttggtctacgtcctgctgctggccgcacagaaagccaatgactgactgagacgaagagcattaccagggaagacggctttaattgggtgctgcagccggggagatgggagttaagtctcaaatccatccccctgactaaaactaggggtttatatagccaggaagaaatgcaccaatgtgtaggaaaacaggaactcgggagggcccagaaagcaatcctgatgaatttggggggtccagcatctcattgtctggatgtggttatctggtgagtttcagttctttgatattttgagaggcccgaaggtcatttcctgaggaaggaattcagataaaacaactgtaaggttcaagcttgaagaccagaagggtcagtttctatgtgtatcaaaaagaacagcctatgggacgattggatcggtttcatgcccaacccagggtacaggatgtgggaagcctgagccggcctggtgagcagcccagacacccgggatggagtattgcagcctctcgccccacagacttgtgaacagggcgtggggacagacacccagctcctagggccatgccacccccacccctgcccgcctctcgcagcacctttcctgtggatctgacccccttccagacacagaagtaagccagcacccagcagacacagggtcacctcccagctccctaccaggcaagagcgaccagggcagggactgatactgccgaacccaggagccaggcccgacccagcctcaggtccagcaggtcccgcctgtccacctgggccaggcctagagcccgggagcccctggctggtgggaggccacccgcaacccaccccacacgcagctccagctcccccaccaggcggggcgactaggacagggacagaacccgttgaacccaggagtgagatccggccccgggtcccgctgggccctcccgtccaccttggctggacctggcgcctgggagaccttggctggcgcgaggccacgcccaccagacatgcagttccagctaccccaccagctgggcgaccaggacagggacggaggctgctgagcccagttagaggcctgccccccggggtctgtcctgggcgctcccccaaggacggacagggcaggcagggtccgggacgatggccgcacagtcccggccccgtgttcccaggcccgtcttgctcctcgatgtgagggagacccgggggatgggacaggctgggccccgcagtgcctgactccctgcagggctcccgggacaggggtccggcggacagccggctgctcacgggtgaggggtccaagctggcattgcggccaccttccggcccgggctctcttggggaggggcggggttggtgagaaccggtcacgtgctccggggctcactcggggtctcccagggccggaagtagggcccctgtgcgcaggcgccctgaggatcccgggctgcccatctcacgccagggggcggaacttcctgcagcctctctgcctccgcatcctcgtgggccctgaccttctctctgagagccgggcagaggctccggagccatgcaggccgaaggccagggcacagggggttcgacgggcgatgctgatggcccaggaggccctggcattcctgatggcccagggggcaatgctggcggcccaggagaggcgggtgccacgggcggcagaggtcccc

SEQ ID NO: 44810 - DNA, 2300 bp, Homo sapien
ctacatttaattgtgccgcaccaatgcactcagcaagtcatctgtagggttgcatgttttcggggagagatccagggcaagaaaaggctctgtgacaggtccaggccacttgacccttatgaccatgtagattcaacaggtacaggacctttgacacactgggaggctacacggagcctctggcaagtcccagtaggagaaacacacagcaaagccctagagttttgaagtaaaccatgccctctaccacaaaagaagtattttccttttgaccaacagcttccagcttgctcctgggctgtggcaaagtctgaatgcttgaccatggggcaccaaagaaccatggaacttcagctgccactgataaatttggtgctatttcatcctcttttggaagtggaatatttgagaccagactcaagcaggtctggaaggtacaggaaagttgctagagcaggtggctcacatctttgtggcccctgctgctgcatgatcaccattccctggacttacacccagaatgtcgtagggagttcctcatgaccaggtctatcggtcaaggtttcaaaaggaagcaaacagtagactcaaggggttgaaatgaggaaagtataattaagggattttttttttaacagaggtgtaagcaagacttagagaattagcaatgcatagtggggctctcagggactggcaacagttgatatggccacagccactgctaagtgctcaagctgcccacaggcagagacaaacaatgaacccttaataacagcattccctggggggaccagacagccacctggactgccatctggaaggggcagcaattttttctcacttgaacaggtactaattttgtacatggattcgcttttttaaaattcacatttctgctggcactcctgcccattgacttactgaacccattattcacactgacattatctcacacaagaaaatcattataagccagtgtgcgcatgctgatggactccactggtgttaccatgttagctcatcaccctgaagcatctggcctgataggatgggaggttggtcattctgttgaagatgctagcaaacgtcacatagatgatacccacaaaaagcagagggtggtgcttaagtggatgggctcttgacacagctctggctgcctatggatgattttctcgtgtggctctcgacaagtgacactgtcatcctgtttttcattttagtaacctgcaaaattgagataataataagagccctttgacagggtgttgtgtggattcaatgagataacgcctggaaagtgcttagcacaatcgctggcatggtgttagcttggcagtaaggaaggtcacaagtgttaggtgctcatgattgttatttttacttagcgtggtcagcacactagttggcacaatcgactttagatccatcttttaaaaccttcgagtcaaagagattgcaaacagcactaccttttgagtttgggtcatttgggttcattaagacatttagaccgtttagccggcaaagcttatcactgaatacaacgatctttgggggagggacatagaaaacacactactgtgcaagcaatcaagtggaatagggaagtccaagaggagtcttgcttttgtttctccgtgaactatgcacatggcagatgcaggtggtacttgggtttcagctccagggtccctgagacccagggaccagcccgtttggcgtggcggattggggatggggcatgagggcaacaggttccaggctgtgctcccattaggtcgcagggctccttccgagcgctttctcgtgaccctgggtgagagtggcaggcgccctgctgcgtaggctcccccccccacaccccccccccgggcacagccgctggcggagctgcagttgctcgaaggggcttcccaggcttcgctgcttgcttttcccgccgtcttgggttgcgggcggcgtcggttccctccccgggggccgcggcggccggaggcgggggtcgcagcggccgctcggggcggcgctgggcgggcgggcgctgggcccgccccgccggcatccttggcccgacttccttctgccgcgggcggctggcccagctggaggaagcggcggcggcggccacgatgagtgcgggcgacgcagtgtgcaccggctggctcgttaagtcgccccccgagaggaagctacagcgctacgtgagtaggggcgccgccacccgcccggccttcgcgtcccggggcacccgcccgcggggcggccgcggggagccgctgggctccgggcgcgccagg

SEQ ID NO: 44811 - DNA, 2300 bp, Homo sapien
ccagatgatgctgttttcctacagcaaatcaacatagccccctggcacctgggatacagctattcctttgccaaatgttattttttcccattcagcagagaacactagaagcagcttactttcatctagcgggaacagaagtacaaccttaggactatatctattctctggctcactgtcataatccacgttgaatggagcttgattgttgtgaatgttgtgctggtttattacactgatgacatatgtactggacctgatgatctagaggtagcgaatactctagatgctttattaagatacaagtacaccacagggcaggagataagccccatgaaaactcaagagcctgaacctcagcaaagtttttagatggtctggaccacgttgggtattcaacatgttgttgtaccgcttaccacctaccactcagaaagaggcacggcatttggtgtggatgtttgaattttgtaggcaacatatgctacatttaattgtgccgcaccaatgcactcagcaagtcatctgtagggttgcatgttttcggggagagatccagggcaagaaaaggctctgtgacaggtccaggccacttgacccttatgaccatgtagattcaacaggtacaggacctttgacacactgggaggctacacggagcctctggcaagtcccagtaggagaaacacacagcaaagccctagagttttgaagtaaaccatgccctctaccacaaaagaagtattttccttttgaccaacagcttccagcttgctcctgggctgtggcaaagtctgaatgcttgaccatggggcaccaaagaaccatggaacttcagctgccactgataaatttggtgctatttcatcctcttttggaagtggaatatttgagaccagactcaagcaggtctggaaggtacaggaaagttgctagagcaggtggctcacatctttgtggcccctgctgctgcatgatcaccattccctggacttacacccagaatgtcgtagggagttcctcatgaccaggtctatcggtcaaggtttcaaaaggaagcaaacagtagactcaaggggttgaaatgaggaaagtataattaagggattttttttttaacagaggtgtaagcaagacttagagaattagcaatgcatagtggggctctcagggactggcaacagttgatatggccacagccactgctaagtgctcaagctgcccacaggcagagacaaacaatgaacccttaataacagcattccctggggggaccagacagccacctggactgccatctggaaggggcagcaattttttctcacttgaacaggtactaattttgtacatggattcgcttttttaaaattcacatttctgctggcactcctgcccattgacttactgaacccattattcacactgacattatctcacacaagaaaatcattataagccagtgtgcgcatgctgatggactccactggtgttaccatgttagctcatcaccctgaagcatctggcctgataggatgggaggttggtcattctgttgaagatgctagcaaacgtcacatagatgatacccacaaaaagcagagggtggtgcttaagtggatgggctcttgacacagctctggctgcctatggatgattttctcgtgtggctctcgacaagtgacactgtcatcctgtttttcattttagtaacctgcaaaattgagataataataagagccctttgacagggtgttgtgtggattcaatgagataacgcctggaaagtgcttagcacaatcgctggcatggtgttagcttggcagtaaggaaggtcacaagtgttaggtgctcatgattgttatttttacttagcgtggtcagcacactagttggcacaatcgactttagatccatcttttaaaaccttcgagtcaaagagattgcaaacagcactaccttttgagtttgggtcatttgggttcattaagacatttagaccgtttagccggcaaagcttatcactgaatacaacgatctttgggggagggacatagaaaacacactactgtgcaagcaatcaagtggaatagggaagtccaagaggagtcttgcttttgtttctccgtgaactatgcacatggcagatgcaggtggtacttgggtttcagctccagggtccctgagacccagggaccagcccgtttggcgtggcggattggggatggggcatgagggcaacaggttccaggctgtgctcccattaggtcgcagggctccttccgagcgctttctcgtgaccc

SEQ ID NO: 44812 - DNA, 2300 bp, Homo sapien
cactcagcataatgctttcaatgttgtatccatgttgtagcatggatcagtacttcatccctttttacggctccattgtatgaatagaccacattttgtttatctattcatctgttcattttggttgtttctaccttttggctattgtgaacagttcttctatgaacatatgtgtacaaccatctatctaaaaatccattttcgattctcttgggtctatacctaggagtagaattggtgagtcatatggtaactctgtgtttaacctttcaaggaattgccagaccattttctaaagtggctgcatcattgtacttgatggtactcatggtttggtcagacaacacccagtttatcatgggcaggtcaggtcttaagaccacatgtatcacagtcattccgtttcagtaaataattacagcaagccaggagcttttcctcctggcaaattattattttttgtgtgtggaggtcttagctttaagtttatttcaaattccagagggctgaactgtgagtctcttattaaagcttggaaaaggctctgtgtagcatcctaatggggtatgccatctccagaaaatggcccactgagtgtcatgcttcttttttagcaagcagagggttccaagtaaggcaacttgtctttctctttggagggaccgtctcaacatgcctcagcccactgcatgcccaggaagttcactgaggtatcacctccctgaattttcaaggggcttctctctcaccttgtggtgaaatatttgccacttcctatgcatcaggtccactcagcatgatgtcttggggtacagtgagatgatcaaatcagttcccagggactcaattatgataatgtgccagaggcttcctttgttctttccttccattatcaccctcagtccttgagtcaggaagcccctctgggaatttatccagctaccaattgtgtttattacaagtatggattcaagaaccggggaaagagccacagggtggctgatagtgaaagggacgtgggctgactccacttctgaccattggaccaagtggcattctacttccccagtgattcacacgggctagtgcaagcccctggtaaatggccacgggtcccacgagaagggaggaggcaggctgaaagtacacacttgtagcgttacatgtgcctggcctcacctttacaggctcacctcacgggctctggcctgtggactgactagatctgggaattagatgaggcaccatgattttccattgtggtgattcaaggcagaatgcctttagccagacctagagttaccggggttatacagatcatgatggcttactacaggacactgtgatcaattagacaccaccaaagatccctggggagaaatcagtttggttccagcttccagccctgctgcctatcatgatacccaggctcatcctgtttctatgagatttagtgccagtgctttgtctctgctgtttggcgtgaagcccggtcgtagagttcaaattgaggtgtgctgtgagcataaacgcacacaccggaaagtctttgcggggacaaaaaaaaaaaaccaatgtaaaataccccattcatactgttgtgttttgcctatatgtggaaatgataatatttcggatacgctgggttaaaaaaattcattataaatcattttcacctttttctttttactcttctttcatgttgctgctggaaaatttaaaagtcaacatgtggcacgcacactactcctattggccatctgctctagctggatgggaactgcaagcagcaaaggcctttcaacctctccgagcttcaacatgttcacttatgcatcaggactgatccaacagcaacctgaaagggtcggtgtgagaaagcaaagaaagaggtactgtttacggagcgttcagccgtgagcccaggcgcaggcgcggagctaaacccggaggtgaagcaactacagctggggccacgcccacagactccgggctgtcggggcgggcggcactcgcgcttccagcctgggccaaccaggctgcttgaggctcgaagcgcatgcgcggtctcgccctccgtactggccgagccagcaaatcgcattgcgcagacgaccagcgggcgcctcggattccgcccccgggatggccccgcctcctcccgccccgcggcaaggcacgcacagggcagtgcgcgggtgggtgggtcctagcagcgcggcctgacgggaccaaggcggcgggagtctgcggtcgttccctcggctgtggaccgggcggcacgcacgcggtgcagggta

SEQ ID NO: 44813 - DNA, 2300 bp, Homo sapien
gagggcagggcacagtgcaagatgcaccaaacagtgtatggggtgctttgcacacattatctcccactgtaatggacactcagagagtgaagggggtgccattagagactgagtggctggggggggtatgaggggagggggaggaaagctgaccccttgattgtcttttcctaccaggcgagtggcaagtatggctcagtcagctcctagcgaagccccgagctgcagtccctttgggaagaagaagaagtacaaagacaaatatctggccaagcacagctcgagtaagctttctgagccttcttgccccaggttcctggcagcattcacgtgtttcccagtctctgtaaccagcagaaaaggggaggtggtgcagtgcgcagcagaaggcgcattctacagaaagcatgtcatttcttctggtttctttttattgaatccatcttcacaagcttgctgcagtcaggccagtggatgtaaaggaggactagtggtgagcccacacctgctcatcaccccacccctcacacagaagtagatgtggtgggagaggggaagtgaggcaagaacacaggccagagggagaggccagggccaggtcatagggagcttcgtgcaccctccctagcgttttaaattttgcactatagactgtggagctggtgaagggttttgagcagagaattcgcacggtcagctttccatctgcatttctcttttctgagacgtcacgtgcacaccaccagccagggaatgatcgtggcagtcttgggttgtaggcaggtaagggggtggagagtcaggatgacaccaggtctctatcttgagcagctgggtcaatagcaccaccatcttctaagataagggacattcaggcagaaccgagatagcattggcattcttcagctctaagtgccaagggaacatctgatactgaaactatggagaagagatgaggacaggagacaagaaaagttggctcagagagatagggcaaggaggaagagagggtgcaaaagttagataaactcccttgctcaaaattccctcaccacactaaaaatacagtccaaagtccttcctccacaccaacctccctcgtctcatctctagtcacttcctccctgcttgttgagatgtcgcgaggctgtttcccatttcagagtgtggaccactgttctccctagctctggaaatgaacactgcttggttttctttgtctctagtttttgatcagttggatgttgtttcctacgaggaagtcgttcggctccctgcattcaagaggaagaccctggtgctgatcggtatcttctcattgccccatttgcacatttctgtctttgttttcctgcctgcatcacgtgcccacccccaaaaaaggcagtgaggaagaaaagaactgaggtctcttgggttctccatatagagcaggtgtaaggaattttctgaatcctcacgtgcaccccacctgggtccacctcacaaatgaaactaaaccttacaagtttctctactatttagcaacgaattatttttggttaggtttcatgctgtctgctggcagtgatacgctttgtaaatctcccttcccccaagcagtgactctgacctgaaacagagtaagtccttgcttcaaacccaggtatgtaggctttgcctctggcggactgctcaccttcctgtctttagagttgaccccagcccagatgcaaccccaactcatgttcacctgttggcagttttgagtgccgagagaggaaaatccgtatcttatcctcgctcctctcccccctttccaaaagatgttcttctctctctacacaggagccagtggggtgggtcgcagccacattaagaatgccctgctcagccagaatccggagaagtttgtgtaccctgtcccatgtaagtagctcttaggcaccttggaggggaggtgacaggctggtaccactcgccatctgaaataccatagtgttattttattattttttaaattattttattttaaatgattattaaaactaaacaaaatatggaaagataaaaatttgtgcccacaattcctccacctaacagaataactgttttcttattgttattcgtgctgtttgtctacataacagaagctatagtaaacattttgatactgccttaaaaattactaagtattaaagtttatacatataactttgtcattttactttttaaacattttctcatgttcctctgcaatttgcctaattctctttgagaactatcccactcttgatgttcaggctgcctctcattttcat

SEQ ID NO: 44814 - DNA, 2300 bp, Homo sapien
acctagccctcactttagaaaagtgaaggagtcagaagtgtcaggagatgtgaaaacgtcagtggcagtcagggatttccattgatcaagtgcctgatcgcctgggaagtagataaggctgagaaaatatggaaggagtataaattggagcaaggccatccatactatggttttcgtacctggacaaacaaggcaactctagtcctgaatattttgcagatgcacagagggagacctggaaggttacagaccaaactgggaatagttgttccctctaggagcagaattgctggctcagagggtagatgtatgttcaactgtaagagataatggaaacccgttttccttacaactggtaccaatttagactcccaccagcaatattcaataaatcatatggattcacatcctccccaacacttggtactgttagacttttaaatttttgacaactgaatgggtgaacagtggtatttcattgtagttttgctttgcattttcctgatcactaatgatgtcgaacatctctttatatgtatgtttattggccatatgcgtctctctgttggtgaaatgcctattcatgtgttttgcccacttctttactggattgtgtttttcttaataatttgtagtcctttatatattcgcaattggaattccttgccacttatctgtattgaaaatattttctcccaatgcacagctgtgttttttgctctttatggtgtcttcataaattaaaattcttaaagtcaaagttaccactattccattctatggtcaatggtttgtctacattgtttagaaatctgtatcccaaagtctaaaagttccttgcctatgtttcctgtcaagagctttaagggtatgtttttgacatttaattccttaatccatctggaatagattattattattttccatatcacatgaatgaggattccaatttcatcttttccaatataaataaccattttccagcgtcagttaataaaatgtccctgtttacttacctaacatgccacttctatcatataccacatttctatacttgcatggttgcgtttcggggttctctattctatgccattgctcaattaatctatccatgcctcaatatcacagtcttaatttcaatctctccccccccaccccacccccccctccccccccgttcgtttagagtgatcttgaggaagggaaccgtcattcacatgagttcggcctcttggtagagaaaactgggcaatgcagctctaaactgttgcccttggattttctcctcttggctatgagctcctccttcccaggaagctttgaggaaggtcagaataagattacatgtagtgatgaactgcttctaatactgtgaggctactagcttggggtaggggaccaagagccgtacaagcccattaaatgtttgttttgttcagaaagccttccatcgctgtgactggtgtttgaatgtctccaatgcgttaggatgctaaggaatcctcctctagggttactaaggaatgtttgctgcctttgctttcgctgagccggaaaaattttgtggcatttacagcaggagatctgccctaagtaaaaacagtttggttttgaaggcaataagatgtttcatcatcaaacagcacacaacaattaaatgacagggtgcagcagcacagcagccttaaaggcattttcgcaatgtccagatctcaaagggtaatgctgcgcccgcatcaatttatgggaagagtctagagttcacctacatcttttgaactccactaagccggccgattctgatttcccttgttgcctccctgcaatccccacgaatttggccagggcacccgggcggctcaggcccaacggggcgtgggccgtgtgctcaaccacccagaagctgggggccccctcccctttcttatctttctggcattcatctcacgcggccacctacagctacgacttcctcaggccctttaagggccgcttctcggagcgcagggagccgcggagtccggggcgtgggagacttccatgggcggagcgagggcaggagtgggcgggccgtaggcggagctccgtccgcgccctcccggcgcaccgcctgcggggcggtgactggcccagccgcaccgcgtctcccgccttctccgcagccccgcaggccccgggccctgtcattcccagcgctgccctgtcttgcgttccagtgttccagcttctgcgagatgaccctcaaggcgagcgagggcgagagtgggggcagcatgcacacggcgctctccgacctctac

SEQ ID NO: 44815 - DNA, 2300 bp, Homo sapien
aaagggcattttgctcctcccagtcaaaaggtgctcctgggtgactggaggccaagtgggagtgtctgggggttgcctccatgtgatgtgcagtagccctacagggaattgccaacaaaattagttttaaaagcctcgtccagggagcacatataggagctgctcaccccaagctttgagccctcccagaggtgctagacctctggagagagaaactgagacacaaaagagggccgaaacaattcagtggtgatgcattgtggagtcctgtccgcaaccagcacactttgacccaccacactaaaccctaggccacagctcagttcctccttttaagaaaaaaacaatgtgggaaacacatcatctaagaataaggaaagacaaggagaacaagcccccttggaagcccatttggtttcatggctcctgtactcgcaagtggctgtgtaaatggaagggccggatttcctacgactccagctgctcacgcgttaggtctgttattgtgcacgttttaaactgacaggcagattacatcaaggaaaattccgagcctgaaggtcaatctgcaactataaagctcctgagttctctatctctctgctttcttttctgcctgctttaagtctgttgttacttttctactgagataaaatccactgtttgcacctaaccgtttctttttgttattgtttttgcaaaccaatgagttgttattaatatcgcatggctagagttctgaagtaaatgctctaggatatttgtttatatgagtgtgtatgtgtgtgtgtttacgtgtatgtagatgtatttggttatatgttttctgccacaaggtaccaaatttggcttaaagagtactcataaattaaataataagcccaaatgcttttcaagctcacatgacttaagtagagtttttactaagctagctttaaaattattggtagagtaatattacaaatatcttcagaaatgtcagtatacatttttgtttgcatttattgatcaagagatttcatacttatccctgccaaatattataaggtgtcaaaatttgtcataaagcttattttattttattttttgagcggagtctgcctctgtcgcccaggctggagtgcagtggtgcgatctgggctcactgcaagttccgcctccggggttcacgccattctactgcctcagcctcccaagtagctgggactacagatgcccagctgatttttttgtacttttagtagagacggggtttcaccgtgttagccaggatggtctcgatctcctgacctcgtgatccgcccatctcggcctcccaaaatggtgggattacaggcctgagccaccgtgcccagctgtcataaaggttattaaacaataaacccagcccaaaacagaatgatctttgcttgtgtaatctttcacaaaaaagacattattattggtttaatgaagacagctaaatcctgaattatttggtaaaataaccatgtattcaatcttaagattctaactcagataaatgcctgaaattcacaagctataaaatggttgacaggaaaataactttggtgactgttgcagttttcataaataatctaggtaaactattaaaataaaataattaggtaaatgtgatgggataaatacttgtagataaacttgccatcatttagaatctaaagttaaataataggtatttcattaaatgggtgttttctaatgaaaaaatatgtattgtaggaaaacattttttctaaaaaatgtgtgtgttcttgttaaagggtgagtaatttttgtctaattcaaaggttatttaaaggttatgtataaaacaaggtaaaaagaaccgggaaataagagatatgtaaagaaaggtatagaaatgaagtatttttggtaagaaagcttaaaaataattttatatgataaagaatcttatatggtaattttttgtcccagaataaaatgattgtttatttaagaaagagggaaggtcaggacaaaccagaaagtccaagcatatcatgaatggtctggccacagctcagttcctccttttaagaaaaaaaaaatatgggatcaaatcttatatgatcggtgggtctcagcagctcgggtggcgggaggagtggcagcggccaggcagcccagtttcgcgaaggctctcggcgcgccgcagcccgcaggcacccggcacacaccctccctgccaccaggatgcccaagaggaaggtcagctccaccaaaggggccgccaaggaagagcccaagaggagatcggcgcggttgtcagctaa

SEQ ID NO: 44816 - DNA, 2300 bp, Homo sapien
actcagagtcaggaataaacccatatatttatgtaaagtttattttcagtaagagttccggcacccctcaatgggtggaggggaagaataatcccctcaacaaactgcgctgggacaactggatagccacatgcaaaagaaggcccctggacccctacctcacatcatgtaaagaattaattcaaaatggatcacagatctaaatgtaagggctgaaactataaaactctaagaagaaaacggagatgtaactttgcacgaccttggattaggcaacagctccttcagtatgacaccaaaggcaaagccacagatatcttttcatttggcaagttggactacatccaaatgtaaatcttttgggcaacaaagggctctatccagaaagtgaatgggagaaacatttgcaagtcacatatctgataagagtctattttccagaatatatgaataagttttagaagcccacagccaaaatacaatcaaccgaattaaaaaatgggcaaagggcttgaatagacattcctccaaagcagaggtacagagggccaagaagcacatgaaaagatgtcttagtctgttttctgttgccataattgaatacccgacactgaacaatttataaagaaaagaaatttatttcttaccgttctggggactgggaagtgacccggcatctggggacggcagagggtatcacacggcgagagggcaagagcgtgtatgtcgtttcaggcctctcttcctattcttataaagccaccagtcgcatcctgggggtctcaccccgatgaccttatctaatcctaattaccgtctcagaggctgcgcctccaatcaacatgtgaatttggggattaagtttccaagacacacaatttgggggatgcactcaaaccacagcaacatcattagccatttgggaaatacgaatgaaaaccaccatgagatagcacttgacacccagtaggatggctactgtaaacaaaacaaaatgaggcaaacagaaaacaggttttgatgaggctgtgaagaaattgggactctcatgcactactgttgggaatgcgaaagattacagctgctgtggaaatcagtttggtggttcctcaataagttaaacagaattaccacacgagccagcagtttgactgctagaaatagacccaaaagaactgaaaagagatattcaaagaaaaacctgtagagagatggtcatggcagtgccactcacaatagccagaagggggaaataacctgtccatcaactgacgagtgggtaaacaaaatgtggcctcctattcatacaacagaatcgtactcagtcattcaaaggaaggaagtagtgattcatgcctctacatggatgcaccctgatgaaaccattacgctaagtgaaagcagccagacacacacggcctcacatttggtcgtataattccatctataggaaatctccagaacaggctaacctctatggacagaaagcagatggactaggggttgccagggactatcgggaacgtgtgtatgggcgggggcagggggtgtgtgtgggagggtgtgggggctggtagtggtggtgtggaaggaggcgtgcggcaagtgactgcttataggtacaggggtttcggtttcttttcggggtgttgaaaacgttttggaactaggtggtcgtgatggatgtgcaacattgtgaaggcgtggtacccgtcctcccctcgcccacccctttgtctttcccacggtgttcccatccagtagaaagggaaagttcccactggcaaagagagggtcaccagcgcgattccccctgccccgccccaccccacccccacggccctccagccacttctaggcccaggcctgctccctcgaggccaatgggaaagtgatgaggtcacctgacggacgtgtgtcccttgtgaggggccgtcaccacatgcgtgcccgtcgccggatgtgcgtgcccattggtctcggctccctagccaatgaggggctgggccctggtcgctaggatacacagtactggacgcggtaactgtcctcttgagagccatcttgcctagctgggccaagccgagatagcacactcaacgcccagcatgccgaggaggaggagacgccgagggtcctccggtgctggcggccgggggcggacctgctctcgcaccgtccgagcggagctttcgttttcagtgagccaggtggagcgcagtctacgggagggccactacgctcagcgcctgagtcgcacggcgccggtctacctcgctgcggttattgagtacctgacg

SEQ ID NO: 44817 - DNA, 2300 bp, Homo sapien
caacagaatcgtactcagtcattcaaaggaaggaagtagtgattcatgcctctacatggatgcaccctgatgaaaccattacgctaagtgaaagcagccagacacacacggcctcacatttggtcgtataattccatctataggaaatctccagaacaggctaacctctatggacagaaagcagatggactaggggttgccagggactatcgggaacgtgtgtatgggcgggggcagggggtgtgtgtgggagggtgtgggggctggtagtggtggtgtggaaggaggcgtgcggcaagtgactgcttataggtacaggggtttcggtttcttttcggggtgttgaaaacgttttggaactaggtggtcgtgatggatgtgcaacattgtgaaggcgtggtacccgtcctcccctcgcccacccctttgtctttcccacggtgttcccatccagtagaaagggaaagttcccactggcaaagagagggtcaccagcgcgattccccctgccccgccccaccccacccccacggccctccagccacttctaggcccaggcctgctccctcgaggccaatgggaaagtgatgaggtcacctgacggacgtgtgtcccttgtgaggggccgtcaccacatgcgtgcccgtcgccggatgtgcgtgcccattggtctcggctccctagccaatgaggggctgggccctggtcgctaggatacacagtactggacgcggtaactgtcctcttgagagccatcttgcctagctgggccaagccgagatagcacactcaacgcccagcatgccgaggaggaggagacgccgagggtcctccggtgctggcggccgggggcggacctgctctcgcaccgtccgagcggagctttcgttttcagtgagccaggtggagcgcagtctacgggagggccactacgctcagcgcctgagtcgcacggcgccggtctacctcgctgcggttattgagtacctgacggccaaggtcccggagctggcgggcaacgaggcccagaacagcggagagcggaacatcactcccctgctgctggacatggtggttcacaacgacaggctactgagcacccttttcaacacgaccaccatctctcaagtggcccctggcgaggactagcttctgacacccggcccctgggacctgacaggtccactcgtccacccacccggccccaaatcccccggcctgaacccccggccttaaacaccctccccccacaacccaggccccaaagtcttgggccttcattaattctgtcaataaaatgtttcaaggaagccatctgcccgcttcagtcactttgccttggggtgggggtgggggggcggtgagatgggttggggggttgtgagacctccacagctggagggatggagaggtggtgggggtctggggttgggtgggagccagggatggcacagaggagcagtctctccgggtgacagtgcaggggagtggccctgggtgggaaggggacacccccgctggttctgagcaagtcagggcctgcccgggaaagtcctcagcatgatggtgttcgttggggcgggtgggcctcaagaccatgactgcagtgttgcgacaggacggacttctaaggcaaccggggtggggacggagaggtggacccggtgcttggcaaggggccctggaccggaagacggaggactgagtagtcggggcggggggggggggggacaacagtctagaaatgcgcagacatggaattagggtcacgagtttcgtttgggtcatgttcagatggagaggctgtgggatgcctttagcaacctagaccacttgcattgcagccgagctagcagcagctggtgccccgccaggccccgcgtaccttcccagggtcttggatccgcatccccgagaccctcgatttgcatacgccgctcacagcccggccaggccccgcctccgatcccgctctttgcacctcatcagggcaaggggcaggctcgggctggggagccggcgcgggcacggcggcagcccgccgagggggacgcagggcacgtcgccccgccccggcccgcccgccagctgcggcggcgcgtcgggaagtgcttggggcggcgagcatggcggcagcggctgcaggcctgggcggcggcggcgccggcccgggacccgaggccggggacttcctggcccgctaccggctggtatcgaacaagctgaagaagcggttcctgcggaagccgaacgtggcggaggccggcgagcagttcggacagctgggccgggagctgcgc

SEQ ID NO: 44818 - DNA, 2300 bp, Homo sapien
aaaaaaaaaaaaaaaaaaaaaatccctattacaaataaaagctgttgtgatccagactgcatatacctctgcgaatggaaccagaaccgtgaattccaatgcaaatcgatgcatcggcaccagacccgctgcactggatgtatctgcattgcagtcacccgagtacggagcacatcatagatgatctctgcaggttcgttgcccacataggaggcatagcgcaaatttcaaaggaacgaatacatcctggagcccaaacagctatctggttctgctgctggcctcctgacaagtaggtaagagagtcacattttatagacgacggacaccaaaaccacacatgaggagtacaagagtagctttatcatggatttagggctgtggttacaaggaagctgtaaggaataaaatgactcccatgaagacgtaccgtgcggacgagtggaaggagaaatttggccattacaaagacacaggaatatgttaagaagtgaggggcaggatgaaatcatctagggtaggtatttagagggagggcgccgtgcaaaataaaatcctcactatgaaacaaaggcggaggcaggaggctgcgttaggtggaagcagcggaggaaggagacgaaagggattgtcattttcatgtcgtggctttttagaagacagccatgtcctctactctgattctatcaaaatgtgttctcggggtgctggtaacgttcagccaacgaaataattcctatggcggcagtaggaataacaaaacgcagaagcgggaacgatgtctttttattcctccccagacgcaaacgtggatgcatgaggtttggtaacaggcaaagtcatctggttaacgtgactgatgcaaaaagtccaggcctgggcaaaaagaagtcactgggtgaatgggatggatcagactccctgtcctgagggggagatggtttcttgcagaacgaggtgaaggaggtggttctgctcagcagtcaacagtggccacatctccacctgcagcgacttgatggcttccgtgtccttttcgtgggtagccatgaccaaagactggagcagcagaaagagctcctcgggaagctggccgctgctctcctgcccgtggctgtcaaaagcctcccaggagtacttctccagggtctgggcgtgctccggcagcagcttggcgggcggtggttgcaggaggagcagcagcagcacgcgggacacctcgcagcggaccagcacgtccgagaaggcgcccagggcggcgggagagggcgccgccgagccggagttcggaggaagcagcgcggccggtagggcgggcgtcgccccgggcccgggctggggtgccggcggcgggggcggcggcagtgactgcaccgggtggctgccgtgctcccgcgccaggcgctgcatgcgcgtgaagaccgccagggcgccggtgtagtcgcgcgccagcagctggcaggaggcggcctcgccaagcgcctgcagcgcggccaggggcagctggggcagctggagctgggcggcgcgctggaagtgaccggcggcggcggccggctggcccaggtcgcgcagggcggcggccagctcgaggcagagggcggcggcggcggccggctggcccagctcgaggtgcagacgcaccgcggcgcccagggcgctggcggcggcctgcagcggctccccgtaggcggcggggcagaccaggcgctggcgcgcgtcgcgctcctgccgcaggaagaggcgggcggcctcggtgagggccagcgcctccccgggcccgtggaagagcgcctgctggcagcgcgccaccgccagctggcaccaggccgcgtagggcagacactcctgggcgcgcagctcccggcccagctgtccgaactgctcgccggcctccgccacgttcggcttccgcaggaaccgcttcttcagcttgttcgataccagccggtagcgggccaggaagtccccggcctcgggtcccgggccggcgccgccgccgcccaggcctgcagccgctgccgccatgctcgccgccccaagcacttcccgacgcgccgccgcagctggcgggcgggccggggcggggcgacgtgccctgcgtccccctcggcgggctgccgccgtgcccgcgccggctccccagcccgagcctgccccttgccctgatgaggtgcaaagagcgggatcggaggcggggcctggccgggctgtgagcggcgtatgcaaatcgagggtctcggggatgcggatccaagaccctgggaaggtacgcggggcctggcggggcaccagctgct

SEQ ID NO: 44819 - DNA, 2300 bp, Homo sapien
cccaaacgtggttttgaaagagctgtttctagttcatcaatctctgttcaaaactttaaaaattctattttcctttcttttggtttgtttcctacaatctggaggtgaatgcttagttcacttattcttcaatctttgtattttaacgataaggataaattacttacagttattaactactctcatgaggttcattccttgaacagtcactgagcaactactatgtcctgggttctaattcaggggtgggcaaactatagccccagaatttggcccatagcctgcttttgtacggactgtgagttaagaatagtttttacacgttgaaaggattgcaaagacaaacatacaaagaaacaaagaagactgtgcaacagagaccacctgtggtctgtaaagactaacacatttctatcccgcccttgacagaaagagtctgtgggctgctggtctcctctaacggtggtagagatgcctgcacggttaacattaatccttggcaccagaatcctcagcacctaggaaccagatcttgcctaacacgctaatttcagtcttgaccaccttcctccggcgtagcggttctcaaacgtctttgtctttgtactattcacgtataaaatattctttcataagcaacatttatccttttgggaatacctcacaatggggagaaggggaaccccaacagcctttaagggttcactgcttcgctgccaccatttccgacggtttacactgttttaagtgtgaatttggaattgttttcaagttaaaaagcaaactaatcatgtcctctgaaagtatttgcttttggcatgctagaaatcagtgttgacttttgatactgatgtgatacattacgagggaattctcaaaactgctgaaatctggcctcggcccagttatcactgctcttaagcttctgagggagatacatgaatgagcccacggcaaatggaaaacgaggagttttagtgtttcctagaattatgctcagatacccactacctgaccgtctggttatccttcccctcacctccctgacgcaaggagtttggaccagaggcctaaggaggcttctcctgaagcccaaatcccaaactggtcaccagtcatgctccgtaactcctgaacctgacaagaagccagccggccaggtctgcagcccgggttaagaggagcataccaggaaagagccaaagagcaaaggagcatgagcccttcaaccgcttttacaataatttgggctaggcgttcagggctccgtaggacccttcctggcagccaagtgagagaaagaggaatgatggtggaatgggcctctcctgtgcttcccattacttccacactgtcgaaatagaaatagaagcagaaaagaacaccctacaagtcccacccatttggaggcactcaactcacagtgacaaccctccacacctctcccctgcaaaaagacgcaaaacaaaaacacctactccaaactgtgtccttacatctcagccccgaagatcaggattgtgtgcaacttcggcccaaaggatgcatttccccagggttgaaagtttgagaaagaggctatattctgaagagttcttgttgtcaccatcaaaaggattaaaaagacgcaataaataagaaaacagcgtagttggggggcatgctccatttgagccagaaagccttggaaacttaagtgttctcaaacggaacgccatcctgctttgggggaacacggaggctgccttgcagtcacgtgatcgcacaacaccaaagggccacgcactctgatttcacctacttaactaaaagttgcagcaaaatccctattacaggccaggcgtggtggctcatgcctgtaatcccagcactttgggaggccgaggagggtggatcatttgaggtcaggagttggagaccagcttggccaacatggtgagaccccatctctattaaaaatacaaaaattagcccagcgtggtggtgcacgcctgtaatcccaggcaccctggaggttgaggtaggagaatcgcttgaacccaggaggcggaggttgcagtgagccgagatcacgccactgcgctcctgcctgggcgacagagtgagactccatctcggggggaaaaaaaaaaaaaaaaaaaaaaaaaatccctattacaaataaaagctgttgtgatccagactgcatatacctctgcgaatggaaccagaaccgtgaattccaatgcaaatcgatgcatcggcaccagacccgctgcactggatgtatctgcattgcagtcacccgagtacggagcaca

SEQ ID NO: 44820 - DNA, 2300 bp, Homo sapien
ccgccaccatttctcacccccggttaacaggccaccctccttctacccttatcctgctagagtttgttttatctacagtgatcagaaagatcagcctaaaagataattctgatcaccaccctcctctactcacaacccggccgtgtctccccattgccctcagtgtagaagtcaatgtccctttgctgaaatgcaaccttagtgaaactttccatgactaacctcctttaaaattgcaacctggtccacccttactcccccttaccccacttctcttttttgcacagcacttattttaccttctaacatactgtataatgtactcatgtattgtaattattgcttatcatccctctttcagttgcttatatttttcatcaatgtgtacccagtgcctaggacaatatctgtctaggacaaatgggtagttatgtggctgtaggcaagccatttaacctctctgtacctcagttactttatctgtatccactttgcggtgttgtcatgaggattaaatcagatagcctatgtgtagcacctggcagtgaatttatcaccctgtactgtaactgtctacttttctgtctcctccattggactgtcattcccagggggttgggaactgggatttcttcatttctgaggcatagaagtatagcatagtggttaggagcatgacttctggagccagagtacatgggtttgaatgctaccactcacaagctgtgtggccatggagaagttgcctaacctctccgtgcttcagtttcatcacccataaaatgaaggtaagaatagtacctgtatttaaaagcacctagaacagttcctggcatatagtgtcagctgtcatctctgcatccttgtacctgtcagagaggagtgtttatcaaaggggcttcttgctgcctgtttccaaaccagtcgacaatataccaattgctccctaacacattcttgtttgtgcagaactgagctcaatgataacatttttatagcaaccctgatcaagtttcttctcataatctcttacactttgaggcccctgcaggggccctcactctccctaataaacattaacctgagtagggtgtttgagctcaccatggctacattctgatgtaaagagatatatcctatacctgggccaaatgtaaacagcctggaaaagtgttaggttaaaaacaaaacaaaataaataaatgaataaatgccaggtggttatgagtgctattgagaaaaatgaagccaagagggatatcagtgatgcaggtgggggtaaagagcttacaacataaatgtggtgttccatatttaaacctcattcaacagggaagattggagctgaaatgtgaaggagttgtgggagtggaactacgtggaaatctgggggaaaggtgttttgggtaaaagaaatagcaagtgttgaggtccaggggcatgagtgtgcttgatattttagggaagagtaaggagaccagtataaccagagtgagatgagactacagaggtcaggagaaagggcatgcagaccatgtgggatgctctaggacctaggccatggtaaagatgtagggttttaccctgatggaggtcagaagccattggaggattctgagaagaggagtgacaggactcgctttatagttttaaattataactataaattatagtttttaaaacaatagttgcctaacctcatgttatatgtaaaactacagttttaaaaactataaattcctcatactggcagcagtgtgaggggcaagggcaaaagcagagagactaacaggttgctggttactcttgctagtgcaagtgaattctagaatcttcgacaacatccagaacttctcttgctgctgccactcaggaagagggttggagtaggctaggaataggagcacaaattaaagctcctgttcactttgacttctccatccctctcctcctttccttaaaggttctgattaaagcagacttatgcccctactgctctcagaagtgaatgggttaagtttagcagcctcccttttgctacttcagttcttcctgtggctgcttcccactgataaaaaggaagcaatcctatcggttactgcttagtgctgagcacatccagtgggtaaagttccttaaaatgctctgcaaagaaattgggacttttcattaaatcagaaattttacttttttcccctcctgggagctaaagatattttagagaagaattaaccttttgcttctccagttgaacatttgtagcaataagtcatgcaaatagagctctccacctgcttctt

SEQ ID NO: 44821 - DNA, 2300 bp, Homo sapien
ttgtgagtagaggagggtggtgatcagaattatcttttaggctgatctttctgatcactgtagataaaacaaactctagcaggataagggtagaaggagggtggcctgttaaccgggggtgagaaatggtggcggcttgggctatgatggtaccactggagagggtgaaaaatggctggattcattgtgagggtaacgtttgtgggaactgctgatgaattttggatctgtgggctttgagaaggaaaaatttggaacaccaagttttttggaataaagttgactaactgggatggggatgactgcatgagtagcttaggggcggggcacactgttaaagggctcctcaggcactgcaggcatagaagctcctttctttcccagtgcttctcttatagcgattacaatgttttaaaaatgtgtcttccagacaaatacagtacaatccaacatgtttgaggttctacagttaacagattgtataattaataatctgggtgggaatgttaatcaggaatgaaatacaatttaaaaattaacaaagtaatgagtcagaggctatattgatagaagcactttttaaggaatagcattccctggcccaagggcttagttgattgaaaattttatctattattgctaaattttaaatcaaaatatggccgggcacggtggctcacacctgtaatcccagcactttgggaggctgaggcgggcagatcacgaggtcaggagatctagaccatcctagctaacaagatgaaactcctcctctactaaaaatacaaaaaattagccgggcatggtggcacgtgcctgtagtcccagctacttgggaggctgaggcaggagaatcgcttgaacccgggaggtggagcttgcagtgagccgagatcgcgccactgcactccagcctgggcaacaagagcgagactctgtctcaaaaataaaataaataaataaataaataaataatcaaaatagaccccattaccaaattttcatgttttcaaggattctctaaaacctacaatattatcaattacatattcacaaataattactgaatacaatatggtatgtggtaaagtacaaaggagtactgtggccatttgtgataaatagaaatcaaattggaaatcttcatagataacgtattttttcttttttttttggagacgcagtctcactctgtcgcccaggctggagtgcagtgtcgcgatctcggctcactgcaagctccgcctcccgggttcacgccattctcctgcctcagcctcccgagtagctgggactacaggcggccgccaccatgcccggctaattttttgtatttttagtagagacggggtttcaccatgttagccaggatggcctcgatctcctgaccgcgtgatccgcccgcctcggcctccgaaactgctgaaattacaggcgtgagccaccgcgcccggccagataaggtatatttttattccttttatttttactcaactcctatggtgccacaaaatcctatattaagcagtataattgaaaagaaaaagaaaacaatagcacaatgattataaagaaaatagcctgagttaacttcatttgtgtcactcctaaagcagtggatcagatgtcaatgtttattatcattcactaattacatttatgaataatttttaaaagtaaaggaaaagactggctgttttaactaacataatagaaactgttgctggattttctgttgaaggtatattttgaagtgagttttattaagtataactcgcatgtaaaattcaaaagaaaaattaaatacataaataaaatgtgtcttcctccactaaaagagtaggacacatcgcagaagccgataaatatttgttcaatgtttacatgaacaaacacggtcactcagccgtctttattttcagtgagtcataggtaaaatattcttcaccaggcgaggattgagtcgcagtcgcgtcaggaactcgcctccaggtactgagcgagcgagccccgacggccgcggtgggtggaggggggaaagtgggggagagtggggcgggagtagagggagagcgagggagggagcctcacccccgggacgctttctgcgcacgcgcatctcggtgcatctgttgggcgggaccgcggggcctgtgacaccgcacgctgagctctgtgatgtagccgcttgcggagactgcaagcagccgcggcgcgcccggccctccctcttccgctgccgccgtgggaatggaaacatctgccccacgtgccggaagccaagtggtggcgacaactgc

SEQ ID NO: 44822 - DNA, 2300 bp, Homo sapien
agtcagatgtcgtctgctgtctccttgacccatagtttcagaaccagtggttgccagttctctgagactgcttaggagagactaacaagcaagacttgaaaaagggagcagtttctccaaaaacaaaagaaaactgacatttgattgtattaggcatacatttcttagctctgtggcattggtattcaaatttggctccacattggaatcacctaggagtttttaaaagagccaacgtgtgccactcctgacccacagtctgatttcattggaaaacttaaaactcctgaggtgattctgctgtgctgtgggagccataacttgctgaatcatgccagagtctctgaattcacagccgtttgtctcttcccacagttggcaaccctcacttttgcaaggtaagttctgcattagcaccatgattggagtgagttttgcagataggtcaggtgaaaatcaaatgtatcgaagagggaagctggtaactggctgtagctgggttgagtgtggtattgctgcatgacaaattcccccaaacctaatggcttcaaataatgatcactttattctctctcatggttacaggagtttggggagggttaaggtaggtgcttgtggatcagagtctcatgtggttacaggccagatgatcagagggttagggtaggtctggacttgtggggcctctttgtgtctctgtctctgtttgtcttccctcctcctctccttatttcccccctgtccatagtctcagtgctcttccatgtggtccctgtgccagtataggcttcctcacactaccatgacctcaggactcccaagcacagttctgcagaaacatggtgcaagttgcatctcctttgttgcccaagcctcacttttgttggctgcttccctgtgggcttgttacgtgctggctctgttgctagacaggtcagactccctgcaaggtggggcccctcctcacacctctctctccttccccttgacccttcaggtggaagtgcagtaacatctctatccctgtggtttcccttatatgctgccccaaacttcataaacattttaatattgctttgaaatgtcttaatttgagtgtgtcctctgtttcgttttggggccctgacagaaataattggtattgaaaatgtctccagaaaggcacctcaaaatgagattttggggttggataattccaatattcaaggggtacagggacactgctttgctgcagaggtgagacatggagaatctgtggcaggcactcatgttatctgtcaccaggggagtgagagcaggaggcaagcataatgttgggagatcagttatatcacaagttatagtttgacatagggatccagtttccttttttccatactgataattgagcagaatttagtgaataattcttccctttcccaacatttgcagcattgtctctttcatatatcagaacccatgtatgtgtggctgtgactctggtttctgtgttctgttccactggtcaactttcgatctttatgacagtactaaagcttaatatttggtaatgcaaattcctccaccttattcttcaggagtgttgcagctacttttgtgtttctgctcattcatctaaattttagatcagacttgtcagttattttcaaaaatcctgttgaaatttttatcggaattgcattggaaccatgtagatatctcttatgatattgagtattctatctgtgaacacgggctttctctccaattatttaggtcttctttaatgcctttgaatagactttttattatttttccgtatagatcttgtacatctgtgattcagttttattcctggataccttataactttagttgctcttgtggatgatacgatttttaaaactacacattctgattcatgctagtgtgttgaaatacagttgatattttatgttgctctttcagccagccaccttgttaaaaaagtcttgtctgggattcttttgggttttgtctataaaatctttttatgccatctgtgaacagtgaaatttttccttcacgtctttatgaatgtagttgctttttcttaccaagctgtagatcatttccagcactttttgcagctttcagagcccagcagcaacgcttgccagttttcagtttattcggctccctctacttgttgtgctgcaatggaagtaggatgttgagctttgtcagtagagggcgctggagggaccttgcagcgggagaggctgcttttcccagttctggtgttgctttgcccctgcagtgcagtcccccagtaatgccaa

SEQ ID NO: 44823 - DNA, 2300 bp, Homo sapien
ttagaaccggcttatttatgtatctataagaaatcctactgggatttgtgatttgggattgcagtaaatctatggataatttggagagaactgggcatcatttctgtgttgagtattccattccatgtacatgatgtgtctctccatttatttaggttgtctttgagttctttcttcagcattttgtagttctcagtatacagatcctgtatgttttatttgatttgtacctaatatttaattattttttgcacccattgttgtaaatcatttaaacatttttcatttccagttcaaattgctagcatatagaaattcagttggttttgtgtgaatttgtgtcctgtgaccctgctaaactcacttttttagtctaggagtttttgttttttgttgaagtctatgaaattttctatgtagacaaagatgtctatgattggagacagtttgacctcttccttgtgaatcaggatgcctcctaattctttttcttgccttgttgtgctgactctgaattcacttctggtacgatatttaataggagtggagacggcggacagctttgccttgttccctgcattcgttctttcaccattctgtacagtgttagctgcagggttttttatgtagatgttctttatcaagttgaggaagttcccctctattgctctttctctgagagttttatcatgaatttgcgttgaattttgtcagatgtttcttgagtcctgccttgaggttaggccaggcgatactgcaggaaaagcaggaaacacgccaccagtttggtggtgctttgaattctggtcttctccaatctgcacgtcgctgtttttatgtaagagccttcaaatagctagtccatgtattctctcagtttaatagcaggattttgtgggataaacagggtggagtaaatgaaccagagccttcttttagatacaaatgttgatactcaactatgtggttgctgtaagtaatttgttctttttagtactaagtaatattctattgtgtaaatatgatacaatttgtttatccattcatgtgttgatagacttttgtgtatttccagttatagactcataaataaaggtactatggcttgattacttgtgaagttgaactttttcctttttgtggacactttcctctgaattgcccttacccatttttaaagtgaactttcttactgatctctataagaagttcacttttttgagtatcaatgttttgtttatgatacacatcacaagtattttctctagtctgtttgggtgactggtggtgccattagctaaaatagggcctagaggaagagcaacaatgcaggaggagactctagcaaggtgaagacttttagtttcagatattttgagattgccaaaaatttggtagagagaagtgatattgatagggcattgattgattggctacagtcattctcttcattcctaggatgatattaatccatcatcaaaatctacatgcttgaatcagatttacactgagttttagtgtttgtgcctgctgtttttatcaagggaaataggtatatgctgtaggtgtctttggatgtggttctcttaatatccgtttatatgaacttgctcatgagaaatctctgtggggccagatgctagatttcttcctgttaagcaacagtaataactgcctgaatgctttgctctgttcacattgtcaggaaactgacactcatgggcacattgtcagagtcattctctggaaacatttgtattggctgtaaggtccatctcttcaccctacatcttgaccccccaccttgattttcatcttatgtaactctttgtaaaagggttgtaagagtataaataatttaaaagaattgccagtagttatttctagtgccaggcatatggcttcgcatataggggggatgctgagtagatgtcatcatgatacaaagaatcaaatggcagatgtctccaaaaatggaaagtcagagggtttcgagagtctacttcaggatttatcctgactaaaagaaataacaaatctgtttctcatttcttgttgtcattattgttgatactgtagcttgcaaaccatactgggtacatcaaagttgactggcaacgagtggagaaggacatgaagaaagccaaagagcagctgaagatccgtaagagcaatcagatacctactgaggtcaggagcaaagctgaggaggtgagacttgcattgttcacgtgtagtgtgtgaacagtgcagacaaaaacagggcttaaccctattgtaccatatctcagtgatggaca

SEQ ID NO: 44824 - DNA, 2300 bp, Homo sapien
gtatgagtcctgagtctgtcacttactagctttgtgaccttggacaagttaacgtctctccacctcagtttcctgaggtgtaaaatgagaattaaagaacatattaatcatgatagtctttatttagcatttcctatatgtttacatatattgactcatttaattttcacaatcttcatagggcgctatgaggtgggcagaattattatcatccccacttaaaggtgaggaaaagaaaggcacagagaagttaggtaacttgctcaaggtcacacagtggggaagttgttgagcttgactccaaatggggcagtttacatgtaccaggcatataaatgcttagtatctagcatataataagcttgccataaatgttaataattttgttctactccagttaaatgcctggagctgtaaaaggcagccatgagcattagaaaagttagtgaacctcattctggaatatgagattgactaccgccgataacaaacaaaaggtatttttcttcttgaaagtgcctaaaggcactatatcccatcaccaaatgttaatgtcataataataagaacagccgttcctgctccatgaggacggggcatactagccacaaacagtaactgaaaataacatatgatataaaattgaaacaagagaaaatttagacaggtccaatgtaactgcacacgaaaattttccaaccttcatcatgatcaaattaattatagaaagatgtgccatgtgatccttacagatcgttaggtaaaaacggaggctgctggcgtgcacattacagatcgttgcactggatggggaccctatgtgtggggagacttgggttggaactgacttgggagaaaagagcaaagcatcaacacttcaagtagcaccttgggaatgttccctttccagtactgccatacctgcctggcttcaaaactacacaaagtagaaaaccaaatcaaagacacgaacacggacgggctgtggaggcggcacggcatatattgtgctttgatttagaatcgctttcaaaatccacgtgtgattcctagacttgtgagttggaagatctgtacttttatccttggcacgtttgacatacctcgaaataaaaattacttttacatatatttttactgtctgatatcatcgagacaaggagacccgaggaaacttgcattctggatacctaatgtgatacatccgaacttgaataaaaactgaagttctccatttccccttccctgtatccaacaaatagctacctaaaagcctttgtagaaagtagcagcagccaagcttaagagtgatactttttcagatacagtataacactgtttctgcaaaaggttactcacatgaatataatgtttcttgggctaattaatccgccttgagaacagctaggctaaaacttccaggtctcccaccctgggccactcaagccaggatcgcgacgtgagcccggggtgagccgaggggcatcccgggccgaggtcactcgaaccgaagttatgaggcgcgggccggcaaccggaagtggtccagggagagttgtacgagattcgggggctgtgacttggaaataaaacaaaataaaataaaaccttaactgttttgggactgactttcaaaagagcgtccccctggctcaagaggccggcgttcgcggagatgtcgtcttaaagggctgtcccccaagcgtgtaggccgcgcacgggtctccttagcgggcgggcaaaatgggcgccggtactcgggaggcgcctgcccaggcgcccgggcgccgctcacagagtacgtccgcctgcggccccagagcgccgcctccctgccgcccccgccgcccggcctgacgcccggaccgcggccggccaccgccctccgccccgacggccacgcctgccccaaaccgcgcgggcgtttcccaggtgctgctgggcgggccccgcccccgtgccccaaggcccgcccccgcgcgccagccgcgcgcccgctgccccctcctcgcccccacagccccgcccccacagccccgcccgctccctaagccccgccccctaggaacccgcgcgccgaaggccaggcctgggcggagcgcacagcgctgggcgctggggaggctgcgccgcagcacccggttggtcaggaccaagtgggcccgaggcggacgtgagaagggtcgggccaagatggcggtgcaggtggtgcaggcggtgcaggcggttcatctcgagtctgacgctttcctcgtttgtctcaaccacgctctgagcacagagaaggaggaagtaatggg

SEQ ID NO: 44825 - DNA, 2300 bp, Homo sapien
tttccatcatgcaaaattttagcacacataccttttcagcaactgtgcgcatttcagttccagtatatgcaaatttggagtcactcctactgggaataaattagaaaaaaaaaaaggaagtggggtttggaatataaaaaggaattaaagcaaaataacaggattaactgtttttgcaatgaaatcttagcagagaccaaagaagaggagggaaactgaattgaggctagagctgcactctatctgttagaagcaatctgggacacatgcacaagtggctgagtgtataaagttataatggacaaagctaaattcctggaatcctgggaactaaggaggtgggcttgagaagtatactatggtatgatttgaagtttaaattaaaatgttaccgaaaggtttcaccacgtcaagtattgaagctactggggatctctgagatcactgaggtccatcaggaggaaaggcaatgtcactgtcaatttacgtgaaggaatggatcaatggggaaatgcctctaaacgtatatgctctctgtcactaagaaaattactgatatctcactggcatttaaggggagacagaacatgaaatacactgagcaaggccaggtgtggtggctcacgcctgaaattccagcacttggggaggtcgaggtgggcagactgcttgagccaggagttcgagaccagcctggccaacatggtgaaaccccgtctgtacaaaaaaaaaagacagccgggtgtggtggcgggcacctgtaatctcagctattcgggagtctgaagtatgagaatcgcttgaacctgggaggcggaggttgcagtgagcagagatcgcgccactgcactccagcctgggcgacagagtgaggctctgtctcacccctaaaacgcaacaattatgataatgcttattaagatgtttatcccatatctcaactgaataggaggtaaggcagaaaccaaagttcaaggttgtatcattaagggagccccggagtgataatggtaattaatttaagacacgatccggacacaatactgccaaagtcgccataattttaggttaacaatgacttagagattataagatatgagtaaacaaatacagtcttaccttgtatcatcgttcaactagagtgggaaaaagcaaaaaacattattgatcacattacgtttgtttgacatatatggatgcagattatatgacaattaggtcatgtgttcacgcacatggtatgaaagactggagaattactttagactgtaaacagctaaactgtatttcctcatcctcttcggcccctcctcaacacaatgcagcggaaacttttgcttccttcaagccccgcaccttctgttaggctcttcgatacccttcaaatgctttggttgatatctctgctccctagacagaagactcgaggcgaggcaaggggctctaactgtggtcagctgctgcgtcgtaatacccggacatcctcattatactccagtgtctttctgacctgccttgcagttttggtcaaccgggcgaaaagcgcagatctaaagagaagccccaggctacaggagaaagggcaaggctcccggggcctgtacagaccgccgggggctcgcaggagactaaacaagtgtcaggcggccagaagaaacggggctccccgcgacagagctatgtaaagggtgtccaaggacctaaatcgaggatgcctgtggcctccgcagccctgggagctgccggcacccaccccggggacacactgggactgctcagcagggttccatccaggctaacagacctactcacctcccctatgcacagccccattacttcctccttctctgtgctcagagcgtggttgagacaaacgaggaaagcgtcagactcgagatgaaccgcctgcaccgcctgcaccacctgcaccgccatcttggcccgacccttctcacgtccgcctcgggcccacttggtcctgaccaaccgggtgctgcggcgcagcctccccagcgcccagcgctgtgcgctccgcccaggcctggccttcggcgcgcgggttcctagggggcggggcttagggagcgggcggggctgtgggggcggggctgtgggggcgaggagggggcagcgggcgcgcggctggcgcgcgggggcgggccttggggcacgggggcggggcccgcccagcagcacctgggaaacgcccgcgcggtttggggcaggcgtggccgtcggggcggagggcggtggccggccgcggtccgggcgtcaggccgggcggcgggggcggcagggag

SEQ ID NO: 44826 - DNA, 2300 bp, Homo sapien
ttgatgaatgatccaagtaccaatataaaaataattgttgaattacttttttcttattacttaacataaatgaaaatatcaagcaacattcatgtcagaactacactagttcatcaattgcaactgtaggttgtctagggagatatgtatttggcaaaaatcaaaagcatcctgtcagaattggttatacagaattaacgataaagagtattgtatattttattatcacttatgaaattgtgtgctatacaccttttacatcaatacaatttataataaatatataccccctttctaaagagaattagttgaacatttatcagcacaacactacgtgaaatgattgtttaagttgttctgtttcctgttgtatgcgtattttctttacattttgttttgttttgtttcaaaagtgtccatggtgaaaaactacaaccttttaaagtctgttttaaaaaatgcttttattaaagcaatctaaagataagctgtaaaaggtgtgggctactgaagggttgctaaagaccaatcatatttagtcaggtaatagctagatttggatctggcaagaggaagtttttttttttttcttttcctttttttttttgctaagagataagaaaatgaccacctatagagttgataaggttagtgtactcttggaaaagctgctgcagccatggcaggaaggaaagaattggtatacaactttctaattaagagaacactagaaaggaaatatattcagcagtataaataagggaatcttctgtttgtacctgtaagggagtaaaacatgagcgataagctgataaggcttttggctccaaaagaaaaacctggcccgaagtgtcaaatactatatctcttagagggatttattccaaattaaaattagtgataatttggagaaatatttcctaaagtttgaagtaagtccttgattggttctaacaatgattaatatagatagggatcagtgaagttgaacaaaatttgcatgtgtatctgatatctcaatgtttttctgtagaaacgttacctacttttcaaaaacaaaatttttttttggaaggcactgaggtgggggagagtggtgaagaatagaattcccatatacttttctctccaggaacagagacattatcttacaaaactgctgaccagaaaaggtcagagtcatggttagctaacatgtcttcatcctcccaagccaaatcgcatagaagccactggagaactagtttggaattccggcttcactactatgtagttgtaggattttggaggagctgtacaggttcactgagctttagtttcctcattcacaatatgacgataccaatttcttcctcatattatatctaaagacatatctatgtctatatgcttgatcgtacattatgtgcggagataaaccggtaacagtgattgcctctgagaagagagacttactttccattgcgtaattcttaggctcatggtagaatttgtgcaagtggatgaagcactgcctcactgggaaacactccagtgaaataaagcacagaaaagagcccgaagaataattacttggttctgtatgacacatgtgcttttaaagggttgtagtgtaggatgacattgggtaagtccatgggcctagaagcctaggtggagttcttaggattttgtatgtagactatgaagttttggaaacgtttgagctggagagaagacattctgatcaaaggtggctttcaggaaaggctggtgcgacaggcagggtatttattagaatgaggccagtgaccactctgaaacagacacaaagtaagttcccttcaaggggcaggaagctccctgggatggtgagaccagaaaggcacagaggctgaaccctcgtgatggcgctaggtcccaggttcgctagcatccgagagaggggattgggtcgctccagaggccattgcgaaggctgctgccagttctagggtcggggtggggtcaggctaggtccctattcctagggctttagcaccgctcactcacaagaccccttttcccaggaggacgtatgggtttttcctgtcgctccagcttctctttcgcggcccttccacgcttgtcacttacctgagcgcagccaatcagcacctagaggttgggctactttcggccaaaggagaacggggacttgtgggggacgctccctgcgcaccaatgaatgtgcatggagatggagaggcgggcctgcaagtgcgaacaagccaatcacggaatcccggcggccggcggcccgggaggcagtcgcgcgctcg

SEQ ID NO: 44827 - DNA, 2300 bp, Homo sapien
ctaagtcaatatttttccaaggaagatacacaaatggccaataagaacgtaaaaatatgcttgaagtcatcagtcgttagggaaatgcaaatcaaactagaataaagtaccacttcacatccatgttagagagaatgtggagaaattggaaccccataggctgccagtgggatgtaatatggtacagccactgtgaaaaagtcaggcatttcatcaaagggttaaacatagagttgccacaggactgaggaattccgttcttaggtataaatcccaaaaaactgaaaacagatattaaaaaaaaaacctggcacatgaatattcgatggtaggattatttagaatagccaaaaggtgggaacaacccaaatgtccctcaatgaatgaatggataaacaagatatggtctatccatatgatggaatagtattcagccacaaaaaggaatgaagtactgatacttgctacagtgtgaatgaaccttgaaaacattatgctaagtgaaagcagccagtcacaaaaatgcacatattatatgatttcatgtatatgaaatgttcagaatagggaaatttatagagacagaaagtacattaatggttgccaaaggctggaggaacatgggatagagagatgatagctaaaaggttctgggttcctttttttaaaaaatatatatacatattttattatacttttagttctagggtacctgtgcagaacgtgcaggtttgttacatatgtatacgtgtgccatgttggtgtgctgcacccattaactcgtcatttacatttacattaggtaaatgtaatccctcctaatgctatccctcccccctacccccacccctctgggttactttttgaagtgataaaaatgttataaaattaactgtggtgatagttgtatatatctgtgagtatactaaaaacctatgctaagaattgttcactttaaatgggtgaattgtacagtatgtgaattttcatgttaatgaagctgattttttttaaagagtaaggcaacgataaaagattacacatagaaggccgggcgcggtggctcacgcctgtaatcccagcactttgggaggccgaggcgggcagatcacaaggtcaggagatcgagaccatcctggctaatacagtgtaaccttatctctactaaaaatacaaaaaattagccgggcgtggtggcgggcacctgtagtcccacctactcgggaggctgaggcaggagaatggcatgaacccgggaggtagaggttgcagtgggccgagatcgcgccactgcactccagcctgggcgacagagagagactctgtctcaaaaaaaaaaataaaataaaattacacataaaaaatacaaaggatatgaagagacaattcccagaagaggaaatgaaatggtcaatacacaagacttggtattgacctcatcagtagtcagagaaatgtaaaaataaagcaatgagacatatttttatttaactaaattctattgagaagaattaagaaagaataaaacatacatatgatgcttgaaataatgcagagcgatggtcttttcacacattgctgggtagaatttaaactgttaaatagttttggaaagtagaatgcccatgtccgttaaatttaaaatacttatactctttgaattcatggccccttttttaagactgtagctcacagaaataaaatacttgtggctacactttaaaataagttatgacaaaagggaaattaggtggaaatggaaagatatttatgatgctttattaattgcaaaaagcgattattaattgaaagtaaggccccagtttaatttttgtaaaaacaaacagcaataaatgcatataggaatacaaacacatataatatttgtgtgtttatgtgagcatggaaacacttgtagactaatatataattatgtgccttcccttttttgtgcagttttgtattgctttgctagtttcaatgaaaaggtatgacattggcagtttgaacgacagagaacagttttaatgaacagagggtgggtggggtagttagaaagggagggatcgcgctaatgttgcagccattttgtgtgcgctcctcttacagatagtgcggcggcccaggcgtcgcgtctacgcgggggattacagtaacccggttgtcagtgatgagtcagagtgcgtggtgctgatgctgctgccatttcatcacctttgcgagcgcagcatccatccctccgctctcccggcgcctgggcctacccagcttcgggctcccaggccagcgatgcgctcgcg

SEQ ID NO: 44828 - DNA, 2300 bp, Homo sapien
tctgttctattggtcaatgtgtctgtttttatgacagtaccttgttattttggttactatagctctgcagtataatttgaagtcaggtactgtgattcctccagttttgttctttttctcaggatggcttttgctattcttggtcttttatggtttaatatacattttaggattattttttctatttctgtgaagatgttattggaattttgatagggattgcattgaaactgtagattgctttgggtagtatggatatcttaacaacatttattcttccaaaccatgaatatgcaatatcctttcatttttttgtttctttcatcaatgtttcatcaatgttttacagttttcatagtagagatttttcacttctttggttaagtatatatatatatacatatatatatctcaccatggaatactactcagacataaaaaatgaaataatatgttttgcagcaacttggatgaaactggaggccattatcctaagtgaagtaactcaggaatggaaaatcgaataccacatgttctcacttataagtaggggctaagtgatgggtatgtaaaggtttgcagaatggtataacggacattggagtctcagaagtgggggagggctggagggaggtgaaggataaaaaataccacctgttcggtacaatgcacactattcaggtgacagatacacttaaagcccaggcttcactactatacaattcacccatgtaaccaaaaaccacttgtacccctaaagctattgaaatataaataaattaataagcaattaaacagacaacctacaaaattgaagaaaatattttcaaactatctcataatggtctcatacttgtaatctataaggaacttaaacgattcaacaagctaaaaccaaataaccccattaaaaagtgggcaaacgatatgaacagacacttctcaaaagaagacatacggttgggcgaggtggctcatgcttgtaatcccagcactttcggaggccgaggcaggtggatcacgaggtcaggagttcgagaccagcctggccaatagggcgaaccccccacctctcctaaaaatacaaaagttagccaggcatggtggcatgcacctatagtcccagctacttgggaggctgaggcagaagaatcacttgaacccaggaggcggaggttgcagtgagctgagatcgtaccattgcactccagcctgggcaacacagcaagactccatctcaaaaaaatatatacatatggccaacaatcatatgaaaaaaagctcaacatcacattagagaaataaaaatcaaaaccacagtgagataccatctcacaccagtcagaatggctgttactaaaaagtcaaataacagatgctggcaaggctgtggaaaaaagggaagatttatacattgctgatgggaatgaaaatgagttaagccacagtggaaagcagcttaaagatttatcaaagaacttaaacaagctaccatttgacccagcaatcccattactgggtatctacccaaaggaaaattaatcattttagcaaacagatactgcacttgtatattcatcatagtactatctacaatagcaaagacatgaaatcaacctaagtatccatcaacagaggattggataaataaattcctctgtaatgggagatttgcctcttttcctccattaattaattaattattaattaagtcatttgtgtccatatggactcctctattttatactttgtgttataatctaatactgcattacagacaaacctcaacttatgaccatttgacttacaaattttcaagtttatggtgggtttattgggatgtaattgcgtggtaagctgaggagcatctggacttatggtttgacttatgattttttgactttatgatgggtttgttggggtactaaatgccttttcaacttacaatatttctaacttatgatgggtttattaagtcatagccccatcagaaggtgaggagtatctatattttattgaggcaatttttccaaatttggcaatctttcaggatgactcctctattcctttgccatgacttcatcttttttttttttttttcctcaattccttactttctggtgctatgagattctccaggcccatcttgtatttcccctgccttggtcctagaatcagttatttctccaagtagctctagttccttttattggagaatgatattagaatccaaggtcttagcattgggtgtgcttgttgctactagggtactattgcttctaggccctctcaggacacag

SEQ ID NO: 44829 - DNA, 2300 bp, Homo sapien
cttggtaccactctcatagtaatgagtgagttctccctctgaattcattgcaagagttggtcgtttaaaagagtgtggcatgtccccccaccactttctctcttcctcccactttcatcatgtgagatgcatgctcccactctaccttcctgaggctctcaccagaagcagatgctggcaccatgctttctgtacagcctgcagaatcatgaaccaattaaacctcttttctttataaattattcagcctcaagtatttctttatagcaaagcaaaaatggattaacacaacatttatatgaaatatttagaataggcaaatccataggtacagaaagtagattaatggttgcctaatactgggagtggtaatgaagattgattacaaatgggtaagaaagatgtcactgacgtgatgcaaatgttctaaaattagattgtagtgatggttgcaccacccaataaatttataaaatcactttaaatatgcaaattttatggcatgtaaattatcctaaatacaatatttaaacactgtgagcatcaagaaaaaaagagaactttcatctccttactttggcaatttattagggatcatacagaggtcattaggctgtttgttgttgttgctgtggtggtggtgggttgtggttttcccatgagagtcgagggtcatgcaaccatttggtcttttaaaataaaaatttttaaatcaattaaaaaagaatattgctggcttgaaatttggagtagtcatggggcaaagagaagtggatggattttttaaaatattcaggatgtagaagtgacaagattttgtagcagttagatatagggagtggggaaaggtgaggaggcctcagactgagtatgcttaaagttgaattcctgttgtcctcccgaactggctgtcctgtgctgccaatctcagtgaatggatcagcatcctggcacagagttgacattcattgattgcctttggagtgaatgaacagagtatgattaatagagtgaaaatatagctaaacaaggcagacaccaggtcctgccaaatagccagtacaaaactcaccattaaggttggctcagcagatgtccagcacaattttcttctcacttttcaaaccatttggggaatcatgaggtctttccctcatccagaagaacactcacctacatatcagccactccttccctagaacctacaggtatggagcaggctgggttttttcaagagcctcttatcctgtaaatctttacacagggcaatggcaggtgcatgtacagcccatatgagcatggggaatgcttggtgttatagaaaggggatcacagtggtgcccaactgatggatctatgttcagtttggctccaagcaggaagagactcttcccaccaaagaggtttgttaatcccggggtccccctcccagcccctggaggcatcagatacagctgtcagaaacattgcagacacagagtgatctcacagagacattcagtttgactggttttactgctgttcccagggttgacaagcagaaatacagaactaatcatggttcctgatacagacgccaaaacaaggaagtgatctgttccagtccaagcttccaagaaataaagaactaggtggggcacactaaacaagcccccagactcaaccaccccagtgaacattccctggttgtagagagaagtgaaatttgcaacccagaacagaaatctggctgtgtgagcagtaggattgggggtggaaacatttaatgaagtacaattttttaaccctcttttagacagtatcactggataaacatccttttcaataataaaaatccaagtcatttctggcccttttcctggaagtgctttcaagttacaggaacaccaataagaggcccttttctgggcatggagcccaggtctcaaagggaggctctagaaaacatctggtctgcttgatatatagaaactagcactgcatgtgtgtgtttctgtgcatgtgtttctcctgtgctgactcatggcattgaagcctctctggaaacacccccacccttctagccaggcagtttatacacacccctttggctcctccttgatttaaatgttagatcacgaggaagaaggaaaacgatttcaagagctgcacttaagcatctagaattttctgcgtcacacctcttgagagaagagactggctccaggtctgactcagtccactacaagctagacggtcttcttaaagcaccaacattacttgagtctttggataaaattgagaaaagagtctacaagtat

SEQ ID NO: 44830 - DNA, 2300 bp, Homo sapien
ttctgtgaaatgaaagccttggactaggcagcgtctaaaggctctgtcactccgtaattgtgtgactttggtaactttgtttgacttctccttgcttaagttttctcatatgggtatggtaaggaaaatacctacctcacaggattttctaacaattttgtgattattaagtatgatgactgatgactaatatatgacagccagctcttacacagtgctttctatatcctggactgttgtaagtgcttttaatccccgcaacaatcccatctccattttacaaatgaaaaatagaggtcacacggctaatacgtgtcagagtttggattaaaacccagaaaaatctgtccccagagacaatgattttaactagcatgcccttttgctcaataaatgttaattccctcaccctttccacacacacacagtctagctgaccattcatagacaataatcccactttcacagtccatccaacaagatcttaaaagaaccatgagaatctctaggtttcttttgcaaatagttttcaagcatttaaaaaaaaaaggtggggggcggggagggagtggccaagatggctgactagaagcagctaggatgagtggttctcatggaggggaaggaaaggggcgagtaaatacagcgccttcaactgaaacatccaggtacccacattgggtctaatcaaggaaacaactcgatccacagagaatgaagaaaagcaaggcaggatgacagcccacccaggagcaacatggagacagaggaacctcctccacccagggaagtcgtaagtgaatgtgcgatcctgggaaaccacgctcctcccatggatccttgcaacccttgggtcaggagatcccctggtgaacccactccaccagggccttcagtctgacacacagagatacatggagtctcagcagagtagccgcttgagcacgtgcagagacccagcagctttacatactccggccctgggtttcccagcaaaagtaactgcaactcctgcaaagcgggagattagacccctgtacatacccctaggaaagaggctgaatccagggggccaagcggcacgatctgcgggccccacttccactgcacctcacaggataagacccactggtttggaattccagccagccaccagcagcagtgttgcacctacctgggacggaggtcccagggggaagggcaggctgctctctgggacagagctcccagaagtggtaccccagaacagcacagcacagctgctcttcagaagcatggccagactgcttctttaagcaggtgcccaatctgttcctcctcactgggtgggacttttcaaccaaggcctccagcaacccctactggtgttctctggctgacagagatttgaattctccctgggacagagttcccggagggagggaggggccaccatctttgctgtttgggcgacttagctgttccggcctccaggctttggagagcccacaccaaccaggggtggaagcagtgccccagcacagcacagctgatctgtgaaagcatggacagactgcttctttaagcagttccctgatcccgttcctcctgactgggtgagacctcccaaccagggtctccagccttgtcctgcaggcgcatttgggctggcaacaggtctgtacctcgctgggccggagctcccagaggaagaggcaggatgacatctttgctgtttcacagccttcactggtgatagctccaggtactggaaaatccaaggagactaggaactggagaagaagcccagcaaagtacagcagccctacagaaacatggccagactgttaaaagaaaaaaaaaatccaaaggtcagcaacctcaaagactgaaggtagataagcccacaaagatgagaaagaatcagtgcaagaatgctgaaaactcaagaagccagagtgccctctttcctccaaatgactgcatcacctctctagcaagggttcggaattgggctgaggctgagatggctgaaatgacataagtagaattcagaatatggataggaatgaacttcactgagttaaaagagtacattgtaacccaatgcaagcaagctaaaaatcatgataaaacattgcaggagctgacagacaaaatagcccatatagagaagaatgtaaccaacctgacggaactgaaaaaacacactacaagaatttcataatgcaatcacaagtactaatagcagaatagacaaagcggaggaaagaatttcagagcttgaagactggctttctgaaataagactggcagacaag

SEQ ID NO: 44831 - DNA, 2300 bp, Homo sapien
atccccaagtctccactcatttttcccccagtcacttaggctcaggccacatgttctgaccgggggttttattgttagttccatttcaaagcctttgcaatggtatttggttctgttaagcatgatcagcagtcttggagctggcgaggtctatatcccttactcagtgcagttctcaaagtcctttgtatgtcgtacaggatcacatctgtacatacacaccttgtggggtaagcccagaagctcatacacagcttcatgggtttactttcccaagcacttcctccctccctgcaatctccccagcactttctgcttccctcagcttccccttttcaaccttgtagccatgaagctgttgctgtcgctttagtgactcttctctgccacacgcttcctgtgcctttgccttcctctggtgtgattcggcaggaagaccaaagaggggaaaaagaagtcacgggcacccctttgggacctacaatcagagaggaaggttactttccttcagagctttaatcacctgaaggccctggcggctgccactgtcactgtcactgcctctgtcaccaccactgctgccacaggattgcctgtgggctagaacatgaaagtacaaagaaaagaagaaagaaaaactggggattcccttaactatcgctgagggttagtattcccttttccctcttctcaagtcagaaccagagctctctctgttcacaccactgtctacttctaacttgcaggctacgttgagccaaggatactaaaggggggaaaatgtcaaattcactgctgtttcagtggtgcttcaaattgtagtctttccccggtctgcctccttccatttacttttcagagtcctcaaatagctggcccatgcactgtgtccacattttatagctgcattcagtagagtgtgcatgcttcatctcacccaggagcagaaacattctggagatgttacattttacttttatatttaagtggaacaaatttgttcccttgtaagtaattgatgtgtgtgtgtgtgtgtgcacacgcgcgtgtgcacgcgcacgtgcttaggtgtctttaatttaaagaatttaagaaattctttaattttttttgaagtaccataacacaactagaatatatctcaatattgattgttctgcatcaatttttgatggtagagactttgtcgttttgaggagcaggttcaattcttcctttatttctggaaacttttcacatatggcatctgtggatatttttctatcccatttattaggctctttacttaaggcatgtaaattatcttaatgttggatcagcattagcgtgaccatctaaagtccttcctccatgcccttgtttcgatttgtgtgcatgtctcttctgcatcttgctcttcctaatttacttctttgatccaccatgtggttctttgagttctcggtttcttttctgagctcagtaatctccttttttaaaaaaaaaaaaaaatcatattcggttgccaatcatctggtctttgaaactttgttaagttgaaatcatattttaaattttactatggcttagagaactctagggttagttgcatctgttccttgttttatgcattcttccagtctgtgatggttatctgtcttttgtatactatgatggtttctttctttctctttcttcttcctttcttctttcttttttctttcttcttctttctttctctttctatttccttatttcttttcttctttttcttccttccctcctcccctcttctctttttccctcctttcttccttctttcttccttccttcctccctccctctctctctcctctcttccctccttttccctctccctctatccctgtagattgttagcatcattgctaaaccatttatttttatttcaattatggaaaacattgtcagacgttctatttgctctaacattctgagggtgataatttgagggcaggtgggatgttgatttcaatctaccttttcttctaagatcttgctaaatatcatgtatcatgctctagtccatccatgcaagggtgtgtcttactctgagggttttgttttgtttgcccaactcagcacggtgtcttggaaaatggaaagaattgggagccttcctaccgctggtgaaatctaggagtggcagttgagggcttctgttcacaaaggtatttacttttttctgcttattctctcagtccatttctcctcaagttagagagccttacatcccattctcaggatctgactggctcacattgtttttcctcagtattgct

SEQ ID NO: 44832 - DNA, 2300 bp, Homo sapien
cagcctcgcagtaatgagtgagttctcacttgattcattcccacaagagctggttgttaaaaaagagtgtagcacctcccccccaccccaccttgattcctctctcatcatgtgatctctgcacttgccggctccccttcaccttatgccatgagtggaagcagcctgagaccctcaccagaaaccaagcagatgccagcaccatgtttcctgtacagcctgcagaatcatgagccaaataaacctcttttctttataaattacccagcctcaggtattcctttatagcaacacagatggactaagaaagtgctgtaggaacacataagaggagtactttacacagacgtttggggttggggaaatgttcctggagaaatggtgtccaatatgaagcttgaagaacgagtacaagttagccaattggaaaagcggggcattggttggcaggggaggggagtggcgatggggaagtgaaaaagctctagcatgactccacagggatagagtgaggtgaccacagactttggagtcattcctggacaaatgggatgaaggaggaggtctgcgtatgggtaggaagatgagttcagtcttgagcgtgtgaaatttgaaatgcctgtgggatatccagatggagatgaaggagatttggcttaggagttcaggagtgaagtcaatactgaaaatacagatttgcgactcatcagggtagttcttgaagccatgaatgtagttgagaccattcagggagagcacatagaatatataaggggaccaaggacaacttcttttaaggggcaagcaaaagaggaacatcattggaagaagactagaggagtgtctccacagataaagttggtgcggggtgggggggcacgctaaaagataatcaagccagaaagagatgagagcaaaggtgcagaaggaagccagaggaactgaagaagaagggacaaactcagaaacacttgctgagttccaaaatgataagcattaaaacctgttcactgagttaagcaatgcaagtgttgctgggggccttggcaagagcaatttcagtggaggggctggaggcagaaactagaccagacttgtactaggagctcgtgagaaattctaagacatatcttcccaatactgggcagcatgataaatgtccacattagagagaattggtgagcaggtcatgctcagccaaggcattttacatgcctagtggaatctcatgcaggaagcttctctaagcgtagaggtaagggtaggtctgatggcaacaatctctcttacttttccttcttctgcgaatgtcttgatttcccctgcattcctgaaggtaatttcactttgtagacagggttctggttcttttgtttcgccacttgagaagtgttatgccacttcctctggcctccatggtttctaatgagaaatatattgccattctaattccttttcccgtataggtaaggtttcctttctctctctctctgcttttgggacttttttcctaggtccttagttttcagaagtttgactgtgatgcttcttggtgtaggtttctttaagattattctgtttggggttcactcagcttcttaaatgtacaggcatgtgtcttttgccgtatttagaatcttccagccattatttatttgaatactttttcagtcccacccccttcctcctttccttctgtcactatgatgacacaaaaggtagctcttttgtcatattcccacagatccccaagtctccactcatttttcccccagtcacttaggctcaggccacatgttctgaccgggggttttattgttagttccatttcaaagcctttgcaatggtatttggttctgttaagcatgatcagcagtcttggagctggcgaggtctatatcccttactcagtgcagttctcaaagtcctttgtatgtcgtacaggatcacatctgtacatacacaccttgtggggtaagcccagaagctcatacacagcttcatgggtttactttcccaagcacttcctccctccctgcaatctccccagcactttctgcttccctcagcttccccttttcaaccttgtagccatgaagctgttgctgtcgctttagtgactcttctctgccacacgcttcctgtgcctttgccttcctctggtgtgattcggcaggaagaccaaagaggggaaaaagaagtcacgggcacccctttgggacctacaatcagagaggaaggttactttccttcagagctttaatcacctgaaggccctggcggctgccactgtcactgtc

SEQ ID NO: 44833 - DNA, 2300 bp, Homo sapien; identical to SEQ ID NO: 44816

SEQ ID NO: 44834 - DNA, 2300 bp, Homo sapien
cagaatcgtactcagtcattcaaaggaaggaagtagtgattcatgcctctacatggatgcaccctgatgaaaccattacgctaagtgaaagcagccagacacacacggcctcacatttggtcgtataattccatctataggaaatctccagaacaggctaacctctatggacagaaagcagatggactaggggttgccagggactatcgggaacgtgtgtatgggcgggggcagggggtgtgtgtgggagggtgtgggggctggtagtggtggtgtggaaggaggcgtgcggcaagtgactgcttataggtacaggggtttcggtttcttttcggggtgttgaaaacgttttggaactaggtggtcgtgatggatgtgcaacattgtgaaggcgtggtacccgtcctcccctcgcccacccctttgtctttcccacggtgttcccatccagtagaaagggaaagttcccactggcaaagagagggtcaccagcgcgattccccctgccccgccccaccccacccccacggccctccagccacttctaggcccaggcctgctccctcgaggccaatgggaaagtgatgaggtcacctgacggacgtgtgtcccttgtgaggggccgtcaccacatgcgtgcccgtcgccggatgtgcgtgcccattggtctcggctccctagccaatgaggggctgggccctggtcgctaggatacacagtactggacgcggtaactgtcctcttgagagccatcttgcctagctgggccaagccgagatagcacactcaacgcccagcatgccgaggaggaggagacgccgagggtcctccggtgctggcggccgggggcggacctgctctcgcaccgtccgagcggagctttcgttttcagtgagccaggtggagcgcagtctacgggagggccactacgctcagcgcctgagtcgcacggcgccggtctacctcgctgcggttattgagtacctgacggccaaggtcctggagctggcgggcaacgaggcccagaacagcggagagcggaacatcactcccctgctgctggacatggtggttcacaacgacaggctactgagcacccttttcaacacgaccaccatctctcaagtggcccctggcgaggactagcttctgacacccggcccctgggacctgacaggtccactcgtccacccacccggccccaaatcccccggcctgaacccccggccttaaacaccctccccccacaacccaggccccaaagtcttgggccttcattaattctgtcaataaaatgtttcaaggaagccatctgcccgcttcagtcactttgccttggggtgggggtgggggggcggtgagatgggttggggggttgtgagacctccacagctggagggatggagaggtggtgggggtctggggttgggtgggagccagggatggcacagaggagccgtctctccgggtgacagtgcaggggagtggccctgggtgggaaggggacacccccgctggttctgagcaagtcagggcctgcccgggaaagtcctcagcatgatggtgttcgttggggcgggtgggcctcaagaccatgactgcagtgttgcgacaggacggacttctaaggcaaccggggtggggacggagaggtggacccggtgcttggcaaggggccctggaccggaagacggaggactgagtagtcggggcgggggggggggggggggacaacagtccagaaatgcgcagacatggaattagggtcacgagtttcctttgggtcatgttcagatggagaggctgtgggatgcctttagcaacctagaccacttgcattgcagccgagctagcagcagctggtgccccgccaggccccgcgtaccttcccagggtcttggatccgcatccccgagaccctcgatttgcatacgccgctcacagcccggccaggccccgcctccgatcccgctctttgcacctcaccagggcaaggggcaggctcgggctggggagccggcgcgggcacggcggcagcccgccgagggggacgcagggcacgtcgccccgccccggcccgcccgccagctgcggcggcgcgtcgggaagtgcttggggcggcgagcatggcggcagcggctgcaggcctgggcggcggcggcgccggcccgggacccgaggccggggacttcctggcccgctaccggctggtatcgaacaagctgaagaagcggttcctgcggaagccgaacgtggcggaggccggcgagcagttcggacagctgggccgggagctgcgc

SEQ ID NO: 44835 - DNA, 2300 bp, Homo sapien
atacagagtgatataatggactttggagacacacaagggggaagagtgtgagggtgtgggataagaaaactacatattgggtacaatgtacactactcgggtgatgggtgcactaaaatctcagaatttaccactatataattcatccatttaaccaaaaagcacttgtaagccaaaagttattgaaataaaaaaaaattaaacagttattgagcaactactatgtcctgggttctaattcaggggtgggcaaactatagccccagaatttggcccatagcctgcttttgtacggactgtgagttaagaatagtttttacacgttgaaaggattgcaaagacaaacatacaaagaaacaaagaagactgtgcaacagagaccacctgtggtctgtaaagactaacacatttctatcccgcccttgacagaaagagtctgtgggctgctggtctcctctaacggtggtagagatgcctgcacggttaacattaatccttggcaccagaatcctcagcacctaggaaccagatcttgcctaacacgctaatttcagtcttgaccaccttcctccggcgtagcggttctcaaacgtctttgtctttgtactattcacgtataaaatattctttcataagcaacatttatccttttgggagtacctcacaatggggagaaggggaaccccaacagcctttaagggttcactgcttcgctgccaccatttccgacggtttacactgttttaagtgtgaatttggaattgttttcaagttaaaaagcaaactaatcatgtcctctgaaagtatttgcttttggcatgctagaaatcagtgttgacttttgatactgatgtgatacattacgagggaattctcaaaactgctgaaatctggcctcggcccagttatcactgctcttaagcttctgagggagatacatgaatgagcccacggcaaatggaaaacgaggagttttagtgtttcctagaattatgctcagatacccactacctgaccgtctggttatccttcccctcacctccctgacgcaaggagtttggaccagaggcctaaggaggcttctcctgaagcccaaatcccaaactggtcaccagtcatgctccgtaactcctgaacctgacaagaagccagccggccaggtctgcagcccgggttaagaggagcataccaggaaagagccaaagagcaaaagagcatgagcccttcaaccgcttttacaataatttgggctaggcgttcagggctccgtaggacccttcctggcagccaagtgagagaaagaggaatgatggtggaatgggcctctcctgtgcttcccattacttccacactgtcgaaatagaaatagaagcagaaaagaacaccctacaagtcccacccatttggaggcactcaactcacagtgacaaccctccacacctctcccctgcaaaaagacgcaaaacaaaaacacctactccaaactgtgtccttacatctcagccccgaagatcaggattgtgtgcaacttcggcccaaaggatgcatttccccagggttgaaagtttgagaaagaggctatattctgaagagttcttgttgtcaccatcaaaaggattaaaaagacgcaataaataagaaaacagcgtagttggggggcatgctccatttgaggcagaaagccttggaaacttaagtgttctcaaacggaacgccatcctgctttgggggaacacggaggctgccttgcagtcacgtgatcgcacaacaccaaagggccacgcactctgatttcacctacttaactaaaagttgcagcaaaatccctattacaggccaggcgtggtggctcatgcctgtaatcccagcactttgggaggccgaggagggtggatcatttgaggtcaggagttggagaccagcttggccaacatggtgagaccccatctctattaaaaatacaaaaattagcccagcgtggtggtgcacgcctgtaatcccaggcaccctggaggttgaggtaggagaatcgcttgaacccaggaggcggaggttgcagtgagccgagatcacgccactgcgctcctgcctgggcgacagagtgagactccatctcggggggggaaaaaaaaaaaaaaaatccctattacaaataaaagctgttgtgatccagactgcatatacctctgcgaatggaaccagaaccgtgaattccaatgcaaatcgatgcatcggcaccagacccgctgcactggatgtatctgcattgcagtcacccgagtacggagcacatcatagat

SEQ ID NO: 44836 - DNA, 2300 bp, Homo sapien
acagaatcgtactcagtcattcaaaggaaggaagtagtgattcatgcctctacatggatgcaccctgatgaaaccattacgctaagtgaaagcagccagacacacacggcctcacatttggtcgtataattccatctataggaaatctccagaacaggctaacctctatggacagaaagcagatggactaggggttgccagggactatcgggaacgtgtgtatgggcgggggcagggggtgtgtgtgggagggtgtgggggctggtagtggtggtgtggaaggaggcgtgcggcaagtgactgcttataggtacaggggtttcggtttcttttcggggtgttgaaaacgttttggaactaggtggtcgtgatggatgtgcaacattgtgaaggcgtggtacccgtcctcccctcgcccacccctttgtctttcccacggtgttcccatccagtagaaagggaaagttcccactggcaaagagagggtcaccagcgcgattccccctgccccgccccaccccacccccacggccctccagccacttctaggcccaggcctgctccctcgaggccaatgggaaagtgatgaggtcacctgacggacgtgtgtcccttgtgaggggccgtcaccacatgcgtgcccgtcgccggatgtgcgtgcccattggtctcggctccctagccaatgaggggctgggccctggtcgctaggatacacagtactggacgcggtaactgtcctcttgagagccatcttgcctagctgggccaagccgagatagcacactcaacgcccagcatgccgaggaggaggagacgccgagggtcctccggtgctggcggccgggggcggacctgctctcgcaccgtccgagcggagctttcgttttcagtgagccaggtggagcgcagtctacgggagggccactacgctcagcgcctgagtcgcacggcgccggtctacctcgctgcggttattgagtacctgacggccaaggtcctggagctggcgggcaacgaggcccagaacagcggagagcggaacatcactcccctgctgctggacatggtggttcacaacgacaggctactgagcacccttttcaacacgaccaccatctctcaagtggcccctggcgaggactagcttctgacacccggcccctgggacctgacaggtccactcgtccacccacccggccccaaatcccccggcctgaacccccggccttaaacaccctccccccacaacccaggccccaaagtcttgggccttcattaattctgtcaataaaatgtttcaaggaagccatctgcccgcttcagtcactttgccttggggtgggggtgggggggcggtgagatgggttggggggttgtgagacctccacagctggagggatggagaggtggtgggggtctggggttgggtgggagccagggatggcacagaggagccgtctctccgggtgacagtgcaggggagtggccctgggtgggaaggggacacccccgctggttctgagcaagtcagggcctgcccgggaaagtcctcagcatgatggtgttcgttggggcgggtgggcctcaagaccatgactgcagtgttgcgacaggacggacttctaaggcaaccggggtggggacggagaggtggacccggtgcttggcaaggggccctggaccggaagacggaggactgagtagtcggggcggggggggggggggggacaacagtccagaaatgcgcagacatggaattagggtcacgagtttcctttgggtcatgttcagatggagaggctgtgggatgcctttagcaacctagaccacttgcattgcagccgagctagcagcagctggtgccccgccaggccccgcgtaccttcccagggtcttggatccgcatccccgagaccctcgatttgcatacgccgctcacagcccggccaggccccgcctccgatcccgctctttgcacctcaccagggcaaggggcaggctcgggctggggagccggcgcgggcacggcggcagcccgccgagggggacgcagggcacgtcgccccgccccggcccgcccgccagctgcggcggcgcgtcgggaagtgcttggggcggcgagcatggcggcagcggctgcaggcctgggcggcggcggcgccggcccgggacccgaggccggggacttcctggcccgctaccggctggtatcgaacaagctgaagaagcggttcctgcggaagccgaacgtggcggaggccggcgagcagttcggacagctgggccgggagctgcgc

SEQ ID NO: 44837 - DNA, 2300 bp, Homo sapien; identical to SEQ ID NO: 44816

SEQ ID NO: 44838 - DNA, 2300 bp, Homo sapien
caccctggaagctgtgtggagaatagaacagagaggattgtgtgtggagaatagaacagagaggactgagattggaattagaaagctgctgtattataccagtcaagaaatgacagatatctcaactaagacaatggcattggtagataagactaggggacagagtccataaaaagtttaggtagtaaaatggcacacagtagacactcactacatattactcatactggcgaacctagctggagacatgataattcatgtgctcattcttcaaaaaatattgaagggtagtgccaggtatactgtgttaagcattgagacaacaccaacgagaaatatagatcagatccctgcatgcagtctggcggaacatacagacaaggagccagacaatgacaacactatactgtgataagtgctatgagaggggaagttcaaggtgctggttatagtttggtttgtttgacccctccaaatctcatgtggaaatttgatacccagtgttggaaggtggggtctaatggaaggtgtttgagtcatggggtggatccttcatgaatggcttggtgccagcctcgcagtaatgagtgagttctcacttgattcattcccacaagagctggttgttaaaaaagagtgtagcacctcccccccaccccaccttgattcctctctcatcatgtgatctctgcacttgccggctccccttcaccttatgccatgagtggaagcagcctgagaccctcaccagaaaccaagcagatgccagcaccatgtttcctgtacagcctgcagaatcatgagccaaataaacctcttttctttataaattacccagcctcaggtattcctttatagcaacacagatggactaagaaagtgctgtaggaacacataagaggagtactttacacagacgtttggggttggggaaatgttcctggagaaatggtgtccaatatgaagcttgaagaacgagtacaagttagccaattggaaaagcggggcattggttggcaggggaggggagtggcgatggggaagtgaaaaagctctagcatgactccacagggatagagtgaggtgaccacagactttggagtcattcctggacaaatgggatgaaggaggaggtctgcgtatgggtaggaagatgagttcagtcttgagcgtgtgaaatttgaaatgcctgtgggatatccagatggagatgaaggagatttggcttaggagttcaggagtgaagtcaatactgaaaatacagatttgcgactcatcagggtagttcttgaagccatgaatgtagttgagaccattcagggagagcacatagaatatataaggggaccaaggacaacttcttttaaggggcaagcaaaagaggaacatcattggaagaagactagaggagtgtctccacagataaagttggtgcggggtgggggggcacgctaaaagataatcaagccagaaagagatgagagcaaaggtgcagaaggaagccagaggaactgaagaagaagggacaaactcagaaacacttgctgagttccaaaatgataagcattaaaacctgttcactgagttaagcaatgcaagtgttgctgggggccttggcaagagcaatttcagtggaggggctggaggcagaaactagaccagacttgtactaggagctcgtgagaaattctaagacatatcttcccaatactgggcagcatgataaatgtccacattagagagaattggtgagcaggtcatgctcagccaaggcattttacatgcctagtggaatctcatgcaggaagcttctctaagcgtagaggtaagggtaggtctgatggcaacaatctctcttacttttccttcttctgcgaatgtcttgatttcccctgcattcctgaaggtaatttcactttgtagacagggttctggttcttttgtttcgccacttgagaagtgttatgccacttcctctggcctccatggtttctaatgagaaatatattgccattctaattccttttcccgtataggtaaggtttcctttctctctctctctgcttttgggacttttttcctaggtccttagttttcagaagtttgactgtgatgcttcttggtgtaggtttctttaagattattctgtttggggttcactcagcttcttaaatgtacaggcatgtgtcttttgccgtatttagaatcttccagccattatttatttgaatactttttcagtcccacccccttcctcctttccttctgtcactatgatgacacaaaaggtagctcttttg

SEQ ID NO: 44839 - DNA, 2300 bp, Homo sapien; identical to SEQ ID NO: 44832

SEQ ID NO: 44840 - DNA, 2300 bp, Homo sapien
ccccaagtctccactcatttttcccccagtcacttaggctcaggccacatgttctgaccgggggttttattgttagttccatttcaaagcctttgcaatggtatttggttctgttaagcatgatcagcagtcttggagctggcgaggtctatatcccttactcagtgcagttctcaaagtcctttgtatgtcgtacaggatcacatctgtacatacacaccttgtggggtaagcccagaagctcatacacagcttcatgggtttactttcccaagcacttcctccctccctgcaatctccccagcactttctgcttccctcagcttccccttttcaaccttgtagccatgaagctgttgctgtcgctttagtgactcttctctgccacacgcttcctgtgcctttgccttcctctggtgtgattcggcaggaagaccaaagaggggaaaaagaagtcacgggcacccctttgggacctacaatcagagaggaaggttactttccttcagagctttaatcacctgaaggccctggcggctgccactgtcactgtcactgcctctgtcaccaccactgctgccacaggattgcctgtgggctagaacatgaaagtacaaagaaaagaagaaagaaaaactggggattcccttaactatcgctgagggttagtattcccttttccctcttctcaagtcagaaccagagctctctctgttcacaccactgtctacttctaacttgcaggctacgttgagccaaggatactaaaggggggaaaatgtcaaattcactgctgtttcagtggtgcttcaaattgtagtctttccccggtctgcctccttccatttacttttcagagtcctcaaatagctggcccatgcactgtgtccacattttatagctgcattcagtagagtgtgcatgcttcatctcacccaggagcagaaacattctggagatgttacattttacttttacatttaagtggaacaaatttgttcccttgtaagtaattgatgtgtgtgtgtgtgtgtgtgcacgcgcgcgtgtgcacgcgcacgtgcttaggtgtctttaatttaaagaatttaagaaattctttaattttttttgaagtaccataacacaactagaatatatctcaatattgattgttctgcatcaatttttgatggtagagactttgtcgttttgaggagcaggttcaattcttcctttatttctggaaacttttcacatatggcatctgtggatatttttctatcccatttattaggctctttacttaaggcatgtaaattatcttaatgttggatcagcattagcgtgaccatctaaagtccttcctccatgcccttgtttcgatttgtgtgcatgtctcttctgcatcttgctcttcctaatttacttctttgatccaccatgtggttctttgagttctcggtttcttttctgagctcagtaatctccttttttaaaaaaaaaaaaaaatcatattcggttgccaatcatctggtctttgaaactttgttaagttgaaatcatattttaaattttactatggcttagagaactctagggttagttgcatctgttccttgttttatgcattcttccagtctgtgatggttatctgtcttttgtatactatgatggtttctttctttctctttcttcttcctttcttctttcttttttctttcttcttctttctttctctttctatttccttatttcttttcttctttttcttccttccctcctcccctcttctctttttccctcctttcttccttctttcttccttccttcctccctccctctctctctcctctcttccctccttttccctctccctctatccctgtagattgttagcatcattgctaaaccatttatttttatttcaattatggaaaacattgtcagacgttctatttgctctaacattctgagggtgataatttgagggcaggtgggatgttgatttcaatctaccttttcttctaagatcttgctaaatatcatgtatcatgctctagtccatccatgcaagggtgtgtcttactctgagggttttgttttgtttgcccaactcagcacggtgtcttggaaaatggaaagaattgggagccttcctaccgctggtgaaatctaggagtggcagttgagggcttctgttcacaaaggtatttacttttttctgcttattctctcagtccatttctcctcaagttagagagccttacatcccattctcaggatctgactggctcacattgtttttcctcagtattgct

SEQ ID NO: 44841 - DNA, 2300 bp, Homo sapien
ttctgtgaaatgaaagccttggactaggcagcgtctaaaggctctgtcactccgtaattgtgtgactttggtaactttgtttgacttctccttgcttaagttttctcatatgggtatggtaaggaaaatacctacctcacaggattttctaacaattttgtgattattaagtatgatgactgatgactaatatatgacagccagctcttacacagtgctttctatatcctggactgttgtaagtgcttttaatccccgcaacaatcccatctccattttacaaatgaaaaatagaggtcacacggctaatacgtgtcagagtttggattaaaacccagaaaaatctgtccccagagacaatgattttaactagcatgcccttttgctcaataaatgttaattccctcaccctttccacacacacacagtctagctgaccattcatagacaataatcccactttcacagtccatccaacaagatcttaaaagaaccatgagaatctctaggtttcttttgcaaatagttttcaagcatttaaaaaaaaaaggtggggggcggggagggagtggccaagatggctgactagaagcagctagggtgagtggttctcatggaggggaaggaaaggggcgagtaaatacagcgccttcaactgaaacatccaggtacccacattgggtctaatcaaggaaacaactcgatccacagagaatgaagaaaagcaaggcaggatgacagcccacccaggagcaacatggagacagaggaacctcctccacccagggaagtcgtaagtgaatgtgcgatcctgggaaaccacgctcctcccatggatccttgcaacccttgggtcaggagatcccctggtgaacccactccaccagggccttcagtctgacacacagagatacatggagtctcagcagagtagccgcttgagcacgtgcagagacccagcagctttacatactccggccctgggtttcccagcaaaagtaactgcaactcctgcaaagcgggagattagacccctgtacatacccctaggaaagaggctgaatccagggggccaagcggcacgatctgcgggccccacttccactgcacctcacaggataagacccactggtttggaattccagccagccaccagcagcagtgttgcacctacctgggacagaggtcccagggggaagggcaggctgctctctgggacagagctcccagaagtggtaccccagaacagcacagcacagctgctcttcagaagcatggccagactgcttctttaagcaggtgcccaatctgttcctcctcactgggtgggacttttcaaccaaggcctccagcaacccctactggtgttctctggctgacagagatttgaattctccctgggacagagctcccggagggagggaggggccaccatctttgctgtttgggcgacttagctgttccggcctccaggctttggagagcccacaccaaccaggggtggaagcagtgccccagcacagcacagctgatctgtgaaagcatggacagactgcttctttaagcagttccctgatcccgttcctcctgactgggtgagacctcccaaccagggtctccagccttgtcctgcaggcgcatttgggctggcaacaggtctgtacctcgctgggccggagctcccagaggaagaggcaggctgacatctttgctgtttcacagccttcactggtgatagctccaggtactggaaaatccaaggagactaggaactggagaagaagcccagcaaagtacagcagccctacagaaacatggccagactgttaaaagaaaaaaaaaatccaaaggtcagcaacctcaaagactgaaggtagataagcccacaaagatgagaaagaatcagtgcaagaatgctgaaaactcaagaagccagagtgccctctttcctccaaatgactgcatcacctctctagcaagggttcggaattgggctgaggctgagatggctgaaatgacataagtagaattcagaatatggatagaaatgaacttcactgagttaaaagagtacattgtaacccaatgcaagcaagctaaaaatcatgataaaacattgcaggagctgacagacaaaatagcccatgtagagaagaatgtaaccaacctgacggaactgaaaaaacacactacaagaatttcataatgcaatcacaagtactaatagcagaatagacaaagcggaggaaagaatttcagagcttgaagactggctttctgaaataagactggcagacaag

SEQ ID NO: 44842 - DNA, 2300 bp, Homo sapien
ctcccccctccccccaccccacaacagtccccggtgtgtgatgttccccttcctgtgtccatgtgttttcattgttcaattcccacctatgagtgagaacatgcggtgtttggttttttgtccttgcgatagtttgctgagaatgatggtttccagtttcagccatgtccctacaaaggacatgaactcatccttttttatggccgcatagtattccatggtgtatatgtgccacattttcttaatccagtctatcgttgttggacatttaggttggttccaagtctttgctattgtgaatagtgcagctataaacatacgtgtgcatgtgtccttatagcagcatgatttataatcctttgggtatatacccagtaatgggatggctgggtcaaatggtatttctagttctagatccctgaggaatcgccacactgacttccacaatggttgaactagtttacagtcccaccaacagtgtaaaagtgttcctatttctccacatcctctccagcacctgttgtttcctgactttttaatgatcgccattctaactggtgtgagacggtatctcattgtggttttgatttgcatttctctgatggccagtgatgatgagcattttttcatgtgttttttggctgcataaatgtcttcttttgggaagtgtctgttcatatctttcgcccactttttgatggggttgttcgtttttttcttgtaaatttgtttgagttcattgtagattctggatattagccctttgtcagacaagtaggttgcaaaaattttctcccattctgtaggttgcctgttcactctgatggtagtttcttttgctgtgcagaagctctttagtttaattagatcccatttgtcaattttggcttttgttgccattgcttttggtgttttagacatgaagtccttgctcatgcctatgtcctgaatggtattgcctaggttttcttccaggatttttatggttttaggtctaatatttaagtctttaatccatcttgaattaatttttgtataagctgtaaggaagggatccagtttcagctttctccatatggctagccagttctcccagcaccatttattaaatagggaatcctttccccattgcttgtttttgtcaggtttgtcaaagatcagatagttgtagatatgcggcattgtttctgagggctctgttctgttccattggtctatatctctgttttggtaccagtaccatgctgttttggttactgtagccttgtagtatagtttgaagtcaggtagcgtgatgcctccaggtttgttcttttggcttaggattgacttggcgatgtgggctcttttatggttccatatgaactttaaagtagttttttccaattctgtgaagaaagtcattggtagcttgatggggatggcattgagtctataaattaccttgggcagtatggccattttcacgatattgattcttcctacccatgagcatggaatgttcttccatttgtttgtgtcctcttttatttcattgagcagtggtttgtagttctccttgaagaggtccttcatatcccttgtaagttggattcctaggtattttatcctctttgaagcaaatgtgaatgggagttcactcatgatttggctcttttggttattttaaaagtatgattaaattatttttttactacagtctccctgttgtgctagcaaatactaggctttattcattctttctaactattttttgtacccactaactttccccacttcctcctcaccctcccactaaccttcccagcctcccttctactctctatcttcatttcaattatttaatttttagctcacacaaataagtgagcacatgcaaagtttgtctttctgtgcctggcttatttcacctaatgtaatgtcctacaggcttatccatgttgtcacacatgacaggatctcattattggttatggctgaatagtactccattgtgaatatgcaccacattttctttatccattcatctgttgatggacacttatgttgattccatatcttggctattgtgaatagtgctgcaataaacatgggtgtgttagtcaaggttctccagagagacagaaccaataggatatatgagagaggatttatgaggtgtagttggttcagatgattatagagatggagaagtcccacaataggccatctgcaagctgcagaaccgaagaagctggtagcacgattcactccaagtctggaagcctcagaactagggaagctgagagtacagaccccag

SEQ ID NO: 44843 - DNA, 2300 bp, Homo sapien
aagaaaaattaataaaattcatacataaaactctttatttgcagatacatgacatcctaacatagactacctcaagtaatctataataaaaccgtgaaaactaataaatgagttcagtaaggtcagaggacacaagatcaacacacaaaaatcaatcatatttctatatacttaaacatgcagaaactgaaatgaaaaatgaccatttcaaaaatagcttcaaataaatttaaatatttaggtataatctaacaaaatatgtataggatctgtatgataaaaattattaaatgctgatgaaagaaatcaaagaagacataaatacatggagaaacaaatcatgttcatggattggaagactcaacatagtaatgatgtcagttttctccaaattgatctatagttttaatgcaattcctgtcaaaatataagcaagattttttttataattataaacaagcttgctctaaaatttaaatggaaatatacaggccctaggagaggcaaaacaattttgaaaatgaagaattaagtgggaagaaatcacttccagactgcagtaatcaagacaatgtggtattggtggagggacagatacatagatcaatggaatagaatagagaacccagaaatagatccacagaaatatagtcaacttatctttggcaaaagtgcaaaagtcattcaatagaggaaggataatcttttcagtaattggtaccagagcaattggacatccataatgaaaaaataaaagaacctcaactcaagtctcacaccttatataaaaaaaaaatcatagtagattgcggacttaaacgtaaaacataaaactataaaacttcaagaaaagaacatatgagaacatcttaaggtcctgactggcgctaggactaaataactcttaaaactcagcagaaaaacaagcaatacaatttaaaaatggataaaagatatgctcagacattttcctgaataggatatacagatggcgaataaacacatgaaaagatgttcaacattattagctgttacagaaatgaaagttagtatcacaatgagattgcactacatacctatcagaatgactacattaaaaaacagtgactacaccaaatactagagaagatgcagagaaattctatcactcatacattgcttatgggaatgtaaaatggtacactctggaaaacagtttggtaatttcttaaaaaaaaaaaactaaacatgcaacccagaaatcacacttctgggcatttatcccgaagaaatgaaaacttatgttcacataaaaccctgtacattaatgttcacatcagccttatttgtaatagccaagaattggaaactacccaatgggttaatggttaaacaaaccatccatacaataaaatcctactcagcaactttattggaactagttcgatacataacttggaagaacctcaattacattatgctgaagtgaaaaagccaatctgcatgatttcatgtttgtaacagtcatgaaataacataattatagaggtagagaacagattattggtgtccaggagttagggattcgggggtaggaggtggcggatgtagctgtaaaagggtaacacgaaggagtcatatggttgagtatcttgattttggtggtggttacacaaagttacacatgtaattacactgcatagagctatgcacacaaatgaatatatgtttaactggttaaatctgaataagcccaatggattgtaccaataccactttcttggtttgggtattgtagtgtggttatataacaagttaacatcaaggaaggggaagagctcatgggactttcctacacatttcttttcaacatcctgtgaatctattatctccaaataaaaaagttaaaagaaaaagcattggaggaaaaaacatgcttatgatgcatacattgactactaatttctctacaatagaaaaaaaatgccatagaaaggtttatttaaaaacaggcaaaatattagcaaaatgtatgccgaagactaaatatccttaatatgtaaggtgcttttgctaaattgtaagaaaagtacaattgttggggggaggagccaagatggccgaataggaacagctccggtgtacagctcccagcgtgagcgacgcagaagacgggtgatttctgcatttccatctgaggtaccgggttcatctcactagggagtgccagacagtgggcgcaggccagtgtgtgtgcgcaccgtgcgcgagccgaagcagggcgaggcattgcctcacctgggaagcgcaaggggtcaggg

SEQ ID NO: 44844 - DNA, 2300 bp, Homo sapien
agccaaactctggtccggaatgttagcagtacagtgagggacaaatgcatgagcagattatattttggaagcagaacaagaacaagtttggtgtgttctaggaacagctggtgtggcgggaacataaaaagacccagatactattgtttttttctattttgttttctagcacatttgtacctattgcttttattcagctattcattcattccaaaaatattaagaagttccactctgtgccatacaccatgtgacctgctacacacacacacacagagagaggaaacagtaaaatatctgacttttattttattacaagtaaaatttatattttattaaaagtaaaatatccaggctccctagagtctggagccaaattacctaggtttgaatctcagctctgaaatttatctgccatgtgatcctggtgaaaattgcttaacctatctgtgcctcagttgccttatccttaaagtagaaataatatcatctaccttaagtgtttgatataaaacaaacacttagcccagtgtttagcatatagtgcacattttataaatgttggttactattattaaggaaacttgcttcttttactgactcaaacaaacaggtattgtctatcaacctgttgccttttctgagtactttgtgttgatttcagcttagctttaagtgagctcattcactctaattgctacagttatgatcttcctgttacaggacattggatcatgctgttctttctgcccaaaactttttttgttttcccatttgcctggccaactccaatttgttctttaaacataagggcataagggcatggactatatctgggctttgtttatcattttacacccagatcttagtacagtgcctggcatacagtaggcactcattaatgtttattgcatgaatgaataccagccagactaaatctagattctcattgtacttagtttttcctctttatgttacattcacactctggatatgtccttttgtttacacactggttctagaaattttttaacaaatatttattaaatatatagacattttagactctgtgcttggagaacaaatatgaaaaacacaagttttctgctctcaagaagctacttattcattagaggacaaagacatgcagaaagagaaattataatctagagtaagtggtactcttgaggcctgtacgagatccattgggcatactggacctagggaaaaaaaatatacaaacttatctgggaaagacagggaaggcttcacagaggaggtgctatctaaattgagtcaaaaataacgagtagccgttttccaaataaacaagtgccgggtaagagcattcatggcagaaggaattccagggcaaagatgtggaggctttttcttcttttgttgatcctgacttctacaaaccaattcctttattgcttttttgacattagattaacacttttaatctcgaataaatataatactgcacaatttcccattttcagtatatatgcatttgattttttttgttgttcttactctcattttttaaatctgccttggatttccattgcatatactatttcagtatactttttggtccttctttgtaatatgtatcgttcttaaatttttacctgcataaggtgttcattcctaatgggtattcccttctagtgctcactgtatgtagcactgtatctggaccctgggttcaagatgctcagctgaatcgatgggagtaatgagcggtatatgacttccataaactcaagaaaatggtggaaaggtagtagaattttacttctagtaaacctggataaactaccataaatagaagcgtagtgggaggactcgggaggagcactgaaatggcaggcaggggacccaggttttatagctttatgggcctgttttttctcatccctgcacctatagcttcaagtatgttcactaaaggcgattgaatagagtgccccggcccagtccttccgaatgggagactgacgccctagcaccgggcgaagtcccgggcgccagaggcacccaccctgcacggccggaaggagtggggcggggcctacaggctctccgctgggcccgagcgggctgggggaggggagcgtggggccgacagttttgggggtgaaaaggcaaaaggcgggtgaaaggctgcctcccgagactctccttgcttggaattctgcccactctgcggagttagcagtcacgacctccagcacaggtgggttccgtcccgtgggtcagggaaggggtgtccccatgggtgctacgggtgg

SEQ ID NO: 44845 - DNA, 2300 bp, Homo sapien
cttaatataggcccacagagtaaaggagggaaaggaattaggcaacccagctattcaactttaaagctagactttaaaacataaaagggcttcaaattgaaatcatctcttgcctctcctatgggttacattagagcaagaacaatttcttaacattcatagctactattcatggggtgcttgctatatgccagagaggttaattgaattgcctcaagggaggtagctcccaggttgaggagcaaaaatttgaaccctgatctatttgacctgaatctagttagtacagtgcttgacacatagttaatgtgcaataaatatttgttgaataagtgtagatgaacctacagtgaatcacaaaagagaatttacaggagatttcctgactagaaattccaaatgggaaaagagagctggatttgtttagaaattacacacacgcacatacacaggcatgcacgcatgcacacacacatatacctacatacatgtcatcacaactgtttggagcaccttaaacacatacatacacacaggagcatgcagacccacacagccgtacttttttaaatctcattatttcttttgtcttcttaacacatctgagagagggtaaatgacagagtgtcagaggtagaaaggacgttagcaattacctaatcagatcccctcatgttaatgtaaaaattgacactctagaggggaagaaaattgctaaggtcacacaaggagtcagaataagattaagagtctcagtttcctgactcacacagtttgttttactctgaactgtcaccatttaccatctcaattttatagatgaggtaaccaaagcatcctaagaatgctgatggccaagctcctgccacttgtccattgaaataggacttgaaatcagatctcctttattttaaatataaagctgctgtcatccaagttcttctgtctggatgcccagaagaaagatcctttcctattgaattaaatagtggactgagggtaatttacagaaagctttgtccttggctttaagagaaaatgtccaaggctgctttattttcagtcccagggaggctgcatgaaggcaggaatccacaacacctagcacaaaggaaggtactcaataaatatttgttgttgaatgcatgccatgctaaagggaaagtaggttgggtaatggtttcccagtggcaatggatgggctgaaaaagtgggaacacatgaggaagaggtgggaggaacccttaaacaaaggagaagctctttctcttcatcttattgaagctgcaatcactcggcacaggctgagtagattggtagaaatgtgattggcaaagatatttaaatgagacctccttaaaattgttactctccaccccacccccacgttcctttaaattttgtttcagtcattacccagggaccggatacagagattcctatggggagttttaatgggtcgattcaatttcatctggatgacgccacttcgccaagcattaagagctacagctccgggaaagccaacgacacgcggggggaggggggagagaaagaaattataacgaggagcaataaatcccttctttcccatcctcccctataacccattcacaagacctccagaaatcatctacattcacaaaacggccagctagctaagctgaacacactgccaactcactccctgcccccactgcagattatataccaacacaccctgagccatataaataatcacacactggcggtatctattgctccgttgagataccctgtgtctacaactgcagtttctgctgcttcggttcatctgtcagattggaggagagggagaccaaggtggaggcggaggcggaggcgaaagaggagggggaggaggtaaaggaggaagaaggggaggagggaaaggggagggcaagaggaggggaaggaaaatactggagggggagggggaagagaaacaggaggaggaggagaagggggaggagaaagaggcggaggaggaggagaaagaagaggaggaggagaaagaggaggaggaggagagagaggaggaggaggagagagaggaggaggaggagaaagaggaggaggtgaacaacttaccctgctgagctttctttgggaaatacgtccatcaagatttagatctgcctgtaaaatctatacaaagtatatgccactacaggtttgactcgccccctcccccgtttttttgttttgttttgttttgttttgttttgttttgtgttttctctgctgtgtcaaagaacaagacagaactatctctgtttctg

SEQ ID NO: 44846 - DNA, 2300 bp, Homo sapien
gcttaaataaaatcctttcctggaccttacatctccatctagctaccaaatttcttcctcccttcagggaaaaacttctcaaaagagttttctacacaagctatctctacttcatcacctctttgatgtggcttttgtgaacccagaaaatgtcagacaggtctctcgcccaggttgaggatgcatgcccgtgacacagcctcgggaagtcctaaggacatgtgcccaaggatgcagcttggttttatacattttagggaggcatgaaacattaatcaagtacatttaagaaatacattggtttggtccagaaacgcgggacaacacaaagaagcgggtgggggatccaggccacaggtaaatttaaacatttgctggttgacaattgattgagtttgtctaaagacttgggatcaatagaaaggaatgcttgggttgtgatgagaagtcgcagaaaccaaaaagttttatcatgcaaatgatgaagcttttagctagcaggcttcagaaagaacaggctgtaaaatgtttcttatcagacttaaagtctgtgttgatgttcatgccagagaggtataatgaggcgtgtccaacccccacttcccttcatggcctgaaccagtctttcaggttaaattttaagagccctggccgaggaggaagtccatttagatggttgagggggccttagaattttatttttggtatacacttttatccccacaattccaataaaatgacacttgaaaatatcaacaataatatgattcatggtcccagtcaagttaacattttccatcttactgttacttcaaccttttaagcagcatatgtatatctgaccaagctcctcttgaaacactctcctatttcagcttctgtgaggccactttcacctgttttttctcctacctctctacacactttattgacttgtcctgttatggttgttattcctcgataagacctctgaatatcgaaattcctgtgggctagatgctggaccctctcgtatacatttctaccttggatgatctcattcctgtccatgggtttatatgccaactatgtgctcataacatccaaatttatatctgtaactctgacatttatgatttctggcatctaattaataaatgtttgttttaaaaaatgtcacacacacacatacacagaaagttcccattatccaaggacagctggcactgaaaatgccaccagaagggaatcaacttaataggggaacaaaatttcatcagaaatgatagaaaagaagttttatttgggactttagaaaactaaaaccaaaaattattaaattaagcttatttaatcttattttaatttaaaatatttaaatttaaaataatttaaattttaatttaaaatataattaatataattatattaaaatataattaatttaaaatttaattttaattgcagctatgcaataatttttagaatggacaaagaatgaaataagaactatttgagggatttggggtagttctctgataaaagtgttgaatgatacagtatcctttacctcataaatagggttatttttaccaaaacgtttgaacaattcactgtttcctccaaaggtctctcattaattggatattcaaaatacccatcactcatcatccaagtggatttttttcacttcaacttaactgatttaaatcgtttttcattggctttgacatattgaaatagttatccaataccactttcaactttatgaaatcctgtgtattttccaagatttataattctacattgcaattaatttcttttttttattgttaacattcaatagtcaacagaggaccagtgatatgatggacaataatacgtgctattgtttagcagaaaggggtttttgaggaggactaattttataagtggttaatttactggtgaaaatttctatggtataagggacttttctttactatacatcataacttataagcactcagaaaaaaattaaaaataattgtatatacacatacacacatgcacatgtctacacatgtatatataaagtcttgtgagatagaggccccaaattgcaggatgaaagttgatttttatatttttcttatttcctgtgacattttctgatttttttcttatttcctgtgaacattttttgatttttctattactggtcatgcatgacttgtataaataaactatcatgacttattaaatgaaagtaggctttgaatagtgtttgaaaacaatgaggtttatagtccctgtctggtgacagctttcatttgcatttg

SEQ ID NO: 44847 - DNA, 2300 bp, Homo sapien
ggcaaaccctgatccaattgccaggatccaatcttgatccaattgccaggaggcaaatatttctgctgtcccactggaatatagggctttcctggcctgcccttctagggtctgcatttgccagccctaggatgaacacttatacaggagctatttctaaatgtctagatagccatgtttatcagtgccccaccattcactatggtaaccctagatgctgaaaataaccatattaaggaaattagcctgtgtacattcactctcgtcatcatcttggttttggtgggttttggctggcttctttactgcagtctgttttatcagcaagatctttatgacctgtatcttgtgctgacctcctatctcatcctgcgacttagaatgccttaactgtctgggaatgcagcccagtaggtctcagccttattttacccagctcctattcaagacaaagttgttctggttcacatacctctgacagggaggcctcaggaaacttacaatcatggtggaaggcaaacgggaagcaggcacatcttacatggccagataattacactacaaattttagggtataaataagattactttaggagagaatatggagtaagagggggctttgctagagtcctgaaagctctaaagagaggcgatatttagagttcacacagcttagtaactcagatctctctgactctaaaactcattctttttctaggatactatgctgcctcttaaagaatagatattgaatacaatataattaagttgatattaataccaaatgcgaacctttgcaaaggggagataaagcaaggggaatgattaagatcaccaggaagagtgtgaagagtaagaagagaagatggcatagggcagaaccctatggaatgtgaacatttctaaagaaaatgaagagctgccacagaggtgggaggagaaccagcagggtgtagttcttggaaagagctaacagaataaaggggttcaaaaaggagggaataagggccgtgtgtggtggctcatgcctgtaatcccaatactttggaagactgaggcgggtcgattatgaggtcaggagttcgagaccagcctggccaatatggtgaaaccccgtctctactaaaaatataaaaaattagctgcctgtggtggcgcacgcctgtagtcccaactgcttgggagactgaggcaggagaatcgcttgaacccgggagacggagctggcagtgagccgagatcgcggcactgcactccagcctgggcaacagagtgagattccatctcaaaaaaaaaaaaaaaaaaaaaaggaataatgaaactaaagtcctgcagagttgaaatacggtaatggcttaaaagtatctatttgttttagcaacactgttgagaattctgtctgtaaaggagaggtgagagaaagaccactagcttatctgtgtttggtctgtgtttgatgagggggcttggggtatggggttaagaaaggtgactttggaatgttttagatgagagaaattttgacagcctttaagtcctgatagtaaagagcgagttagcagagagccgttgaggagtcatgcaacggaagggttcatcagaggagcttgactctgagtcggcaacagggaatagagatggaagagggctggcttagatcaaaggagagtagtcgtttattattattattattgcaaaaagaataggagaaaggattggtgaggggtacaagaaaattagaaaatttcatggcgaaagtagaggcagttcctgtcagatgaattctattttgtctgtgaggaaacgggcgacgctgcctactgagactaagcaggagagacggggcaagcttggctcttcatttatgccgcctactcattgctggtagattctttatctagcctgcatcctctcattttcctggatccctatacggcatttgacgctgtttaccacaagagctgtcgaacgaacgtgaaacactcagtgatactccaaccggaactactactcccagaatgcagtacggctcctgggaagtgcggggggctgggaacgcagcaggcctagccgtgtcgcctgctgccattggaggagcgctcccactcccaagaggccacgcgtagacggggcgcttcatgcggaagtcagcggcgtccggtcccagcctcctctgggagcgggcagttggcgaccctgcactgacccgcgtccctccgtcccgagcccgcgcgccctcagagggtgcccggacaggtaaatggagtggggtgcgcctgcgggaggcggggagagaactg

SEQ ID NO: 44848 - DNA, 2300 bp, Homo sapien
gatatgggtagtgtggtctgctggtcttgagttagtaaattctggcttcagcaagatagaaggcacactgacagaaagaagctgtcttggtaaggacactagtgcagggatggctccagtgagtagaacagtatatgcttgtagcaggtaagactggagccaagctgattaaaattcaaccccaaagaacacacaagtaataaatacatgaaaagatgcttatcttgactaatactcaaggaagtacaaattagaaccacattgaaatatcttagcctatcagattggcaaagatgaaaaagactgataatgtttactgttggtgaaggttacaggcattcttacattgttggtgagagcaaaagtctgtgcaacactttttatgtagggccatatctcagcatctatcaatattttaaaatgctaaccctaagaccccacaattctacccctagcaatttatcctacagtaggactcactctgttgtttgaagatccatgcccagaattattcacgaaattcacttaaaatagcatatatgcttgaacccaggagtctgaggctgcagcgagctatgatcatgtcactgcactccagcccagcctgggcgacagagcaagactctgtgtctaaagaaatgaaaataaaaataaataaaatagcatatacaggcaacaatccaaatgttcattgcagaaattatgattattattgtttttcttttagaggcagggtgtcactctgttgcccagactaatcttgacctcctgtgatcctcaagagatcctccggtctctgcttcccaaagttcttggattacaggtgtgaggcactgggcctagacattgcagggattattaaaccatggtgcatactaccattaaaggtatgaggtaggttttatatgctgacctagaaagatggtgcaacaccataggggaacaagaaggctgcaaagtggcagcacagcaggagtctttaagaaataggtatttgtttcagcttaagaagtgtctggctgggcgtggtggctcacacctgtaatcccagcacttagggaggcttaggtgggcggatcacttgaggttaggagttcaagaccagcccagtcaacacggtgaaaccccatctctactaaaaatacaaagaaattagctgggcttggtggcaggtggctgtaatcccagctactcaggagctgaggcaggagaatcatctgaacccgggaggccgaggttgcagtgagcctagatcgcaccactgcactccagcctgggtgacagagtaagactcggtcaaaaaaaaaaaaaaaaaagaccgggtgcgaggtggctctcgcctgtaatcccagcactttgggaggcctaggcaggaggatcacaaggtcaggagatcgagaccatcctggccaacatggtgaaaccccatctctactaaaatacaaaaattagccgggtgtgatggcacacgcctgtagtcccagctactcaggaggctgaggcaggggaatcgcttgaaaccaggaggtggaggctgcagtgagccgagatcacgccactgcactccagcctggcgacagagcaagactccatctcaaaaaagaaaagaaaacaaacaaacaaacaaaatccccaaaaagcaaaagtgtctgcatggacttgtgcctaactactcacagtggctacttcttgggggaggtgaaaggggaccctgttaaagaatttttcttctgtattgtttttcttcaactgagtctgcattaattttatatttaatactctccccacccctgatgctcacaggttgctttagctggtggaaggagaacctgcacctctggttttggcaaagtgtagaaggggacaagggcactgctctgcacctgcacaggttcttgcctcctggggtcagtttaatgaatctcagtggtgtttcttgggaagaacacagtggacactcacttgccagtcagtagacaaatcactgaagtccatgtctggcagttctcaatgtcatggggactgtaaggttgtcatgtctcacagttccctgacttagaagattagtggtgacagacacttctcagctctgctcgggagagcagctctgtaatgcgcttgtggtttcagatgtgggcggcctgtgtgaacctgtcgtgcaaagctcacgtcaccaactgctgcagttatctcctgaatcaggctgagggtctttgctgtgcacccagagatagttgggtgacaaatcacctccaggttggggatgcctcagacttgtgatgggactgggcagatgcatc

SEQ ID NO: 44849 - DNA, 2300 bp, Homo sapien
agcttcccagccactttgtttacctactcaagcctcagcaatggcgggcacccctccaccagccttgctgccaccttgcagttcaatctcagactgctgtgctagcaatgagcgaggctccgtgggtgtgggaccctccgagcccaggcgtgggatataatctcctggtgtgcggtttgctaagaccgttggaaaagcgccagtattagggtgggagtgaccctattttccaggtgccatctgtcacagcttcccttggctaggaaaagggaattccctgaccccttgtgcttcccgggtgaaggcgatgtctcgccctgcttcggctcaagcttgtgggctgcacccactgtctgacaagccccagtgagatgaacccagtaccacagttggaaatgcagaaatcacccatcttctgcgtcactcaggctgggagctgtagactggagctgttcctattccatgtctttatcttttaattgggttgtttttcttcttgttgagtattagaatgtctttgtatattttgcatgcaagtctttttttcaggcttgttttataaatattttctctcagtgtgtgccttattttttgattctcttaacaggatatttcacagagtagtcattttaaattttaatgatgtccaaattatcattttttttcttttatggactggcttttggtattgtatctaagaactcatcaccaacccaaagtcacgtggattttcttctataaaacttttacaattttatatttgatcatttaaggctacagactatcttgagtgattttttgggggtgagctatgaagtttttgtccacattcagtgttttccgtatggtttccgattgtctattgccatttgtggaacagacttttctttccccagtgaattgcttttgcccctttgacaaaatcaattgaatgtatttactcgggttttttgggttctgtattgtgttctgttgagctgtttgtccattccttcaccaatatcactctcttcattgctttagctttgtggtaaagctaacaataatgagtgtactgctcctaaacaaggagtatctgcatttgatttaatatttttgattcttctcaaccgtgatctaaagttttctgaatgcatatttgtatgtattttgttagatttatacctaataaattaaatttgggaatgctattgtaaatggtatttttttcaaatttcaagttcaaattattcctatacattattgctgatgatagaaagaaaatcaggcagtgtgtggtggctaacgcccgtaatcctagcactttgggaggcctagttgggaggatcatttgagcttgggagttctagaccagcctgggcaacatagttagacctgccccgcccataaaaaataaaataataaataaaggaaaatcaggtggtgccggacacagttgttcacacctgtaatcccagtgtgttgggaggctgaggctggagaatttcttgaacccgggagctggaggctgaactcgggagctgtgattacaccactgcacttcagcatgggtgacagagcgagaccctgtctcttaaagagaaaagaaagaaaatcaattaagttttgcctactggccatcttttttttgagatggagtttggctctgtcacccaggttggagtgcagtgacatgatcttggctcactgcaacctgcgcctcctgggttcgagcaatcctcctgcctcagcctcctgagtagctgggattacaggcacgtgccgccatgcccagctaatttttgtatttttagtatagatgcggtttcaccatgttagccaggctggtctcaaactctggacctgaagtaatccgcccgcctcagcctcccaaaatgctgggattacaggcatgaactggccatcttctttgcttccttgctccatgagttccgatcaaggcatgggatggtgggctccatttcagtcgtaatttccaaaatccacagcctggaaaaatctagacgctgattttcagagactccccatggctgccgcaagggggcgcatggcccctggcaactcggggcgccgtgcacgcaccgcgtctcatccacacagcggcagtcactttgcggccactatgaggactgagcttcctctccccaggacccgcatgggagagaccgcggcttcgagacacctggggacacctggggacacctggggcggcgtccgcggtgaggactgggagacgctgctgcatctccgggacaccacttggggccgaggccaaggtgaggaaaaggcttcccgccccc

SEQ ID NO: 44850 - DNA, 2300 bp, Homo sapien
gaagaaaatccacgtgactttgggttggtgatgagttcttagatacaataccaaaagccagtccataaaagaaaaaaaatgataatttggacatcattaaaatttaaaatgactactctgtgaaatatcctgttaagagaatcaaaaaataaggcacacactgagagaaaatatttataaaacaagcctgaaaaaaagacttgcatgcaaaatatacaaagacattctaatactcaacaagaagaaaaacaacccaattaaaagataaagacatggaataggaacagctccagtctacagctcccagcctgagtgacgcagaagatgggtgatttctgcatttccaactgtggtactgggttcatctcactggggcttgtcagacagtgggtgcagcccacaagcttgagccgaagcagggcgagacatcgccttcacccgggaagcacaaggggtcagggaattcccttttcctagccaagggaagctgtgacagatggcacctggaaaatagggtcactcccaccctaatactggcgcttttccaacggtcttagcaaaccgcacaccaggagattatatcccacgcctgggctcggagggtcccacacccacggagcctcgctcattgctagcacagcagtctgagattgaactgcaaggtggcagcaaggctggtggaggggtgcccgccattgctgaggcttgagtaggtaaacaaagtggctgggaagcttgaactgggtggaacccaccacagctcaaggaggcctgcctgcctctgtcagactccacttctggggccagggcatagtcgaacaaaaggcaacggaaatctctgcagacttaaatgtccctgtctgacagctttgaagagagtagtggttctccaagcacggagtttgagatctgagaacagacaaactgcctcctcaagtgggtccctgacccccgggtagcctatctgggaggtaccccccagtaggggcagactgacacctcacattgccgggtacccctctgagaccaagcttccagaggaacgatcgggcagcaacatttggtgttcagcaatattcactcttctgcagcctccactgctgatacccaggcaaacagggtctggagtggacctccagcaaactccaacagacctgcagctgagggtcctgactgttagaaggaaaactaacaaacagaaaggacatccacacaaaaaccccatctgtacgtcaccatcatcagagaccaaaggtagataaaaccacaaagatagggaaaaaacagagcagaaaaactgaaaattctaaaaatcagagcgcctctcttcctccaaaggaacaaagctcctcaccaacaatggaacaaaggtggacggagaatgactttgacgagttgagaaaagaaggcttcagatgatcaaacttctccgagctaaaggacgaagttcgaacccagtgcaaagaagttaaagaccttgaaaaaaagattagatgaatggctaactagaataaccaatgcagagaagtcctgatggaggtgaaaaccatggcacgagaactatgtgacgaatgcacaagctttagtagccgatgcgatcaactggaagaaagggtatcagtgattgaagatcaaatgaatgaaatcggggtcagggtcaagggtcagggtcagggtcagggtcaagggtcagggtcaggggtcagggtcagggtgagggtcagggtcagggtcagggtgagggtcagggtcagagtcagggtcagggtgagggtcagggtcagggtcagggtgagggtcagggtagggtgagggtcagggtgagggtgagggtcagggtgagggtcggggttagggttcagggtcggggttagggttcagggtccgggttagggttcagggtccgggtcagggttagggtcagggtcagggttagggtcagggtcagggttagggtcagggttttagggtcagggttttagggtcagggtcagggtgagggtcagggtcagggtgaggaccctttacagcagatgaaggcctctccccagccagaaaagatggagcacacgctgggtggtggccccgcttcctcactggaaggagatggtgctcttcttttttctttctgaattgtggccaccttcataccagtctgtcatggaacacttaagccgcttgagtgcctgctggtactcccagccctgccatgcctgagccccctgcacacaaggagccaggagtaatcagggcagacccattagggcacggggacttctggattgtgaaattggctctct

SEQ ID NO: 44851 - DNA, 2300 bp, Homo sapien
caccctaatactggcgcttttccaacggtcttagcaaaccgcacaccaggagattatatcccacgcctgggctcggagggtcccacacccacggagcctcgctcattgctagcacagcagtctgagattgaactgcaaggtggcagcaaggctggtggaggggtgcccgccattgctgaggcttgagtaggtaaacaaagtggctgggaagcttgaactgggtggaacccaccacagctcaaggaggcctgcctgcctctgtcagactccacttctggggccagggcatagtcgaacaaaaggcaacggaaatctctgcagacttaaatgtccctgtctgacagctttgaagagagtagtggttctccaagcacggagtttgagatctgagaacagacaaactgcctcctcaagtgggtccctgacccccgggtagcctatctgggaggtaccccccagtaggggcagactgacacctcacattgccgggtacccctctgagaccaagcttccagaggaacgatcgggcagcaacatttggtgttcagcaatattcactcttctgcagcctccactgctgatacccaggcaaacagggtctggagtggacctccagcaaactccaacagacctgcagctgagggtcctgactgttagaaggaaaactaacaaacagaaaggacatccacacaaaaaccccatctgtacgtcaccatcatcagagaccaaaggtagataaaaccacaaagatagggaaaaaacagagcagaaaaactgaaaattctaaaaatcagagcgcctctcttcctccaaaggaacaaagctcctcaccaacaatggaacaaaggtggacggagaatgactttgacgagttgagaaaagaaggcttcagatgatcaaacttctccgagctaaaggacgaagttcgaacccagtgcaaagaagttaaagaccttgaaaaaaagattagatgaatggctaactagaataaccaatgcagagaagtcctgatggaggtgaaaaccatggcacgagaactatgtgacgaatgcacaagctttagtagccgatgcgatcaactggaagaaagggtatcagtgattgaagatcaaatgaatgaaatcggggtcagggtcaagggtcagggtcagggtcagggtcaagggtcagggtcaggggtcagggtcagggtgagggtcagggtcagggtcagggtgagggtcagggtcagagtcagggtcagggtgagggtcagggtcagggtcagggtgagggtcagggtagggtgagggtcagggtgagggtgagggtcagggtgagggtcggggttagggttcagggtcggggttagggttcagggtccgggttagggttcagggtccgggtcagggttagggtcagggtcagggttagggtcagggtcagggttagggtcagggttttagggtcagggttttagggtcagggtcagggtgagggtcagggtcagggtgaggaccctttacagcagatgaaggcctctccccagccagaaaagatggagcacacgctgggtggtggccccgcttcctcactggaaggagatggtgctcttcttttttctttctgaattgtggccaccttcataccagtctgtcatggaacacttaagccgcttgagtgcctgctggtactcccagccctgccatgcctgagccccctgcacacaaggagccaggagtaatcagggcagacccattagggcacggggacttctggattgtgaaattggctctctgggggccaaggccttctaacgttggtggaagtggctttggcttattgggtcggattctaggccattcgttccaacctttagagacatcccagctttccctagcccagagtctgcagcccctccaccatcccacatcctccccctccctttcctcatgaaccccagtcgcgcctctgccttctcaaacccctccaccatcccacaccctcctcctgcccttcctcatgaaccccagtcacgcctctgccttctcatccctgcgcgccacacaggctcgctcgtgcccggtgaatgctgaggctgctctgcacgtggagtgtggccctgtgggcaagggctgggctcttggaggtaggggagctacaggggcgactgggaggaggatgttgtgttacacacgcatcagagttaactttgcagtgagagcagccttgctgcggccaaagaacatggaaaagcatgagtggggtgatgtgccttaaagcatcagacacttgggcctcgggcatcaggagccagccac

SEQ ID NO: 44852 - DNA, 2300 bp, Homo sapien
ctttctgaattgtggccaccttcataccagtctgtcatggaacacttaagccgcttgagtgcctgctggtactcccagccctgccatgcctgagccccctgcacacaaggagccaggagtaatcagggcagacccattagggcacggggacttctggattgtgaaattggctctctgggggccaaggccttctaacgttggtggaagtggctttggcttattgggtcggattctaggccattcgttccaacctttagagacatcccagctttccctagcccagagtctgcagcccctccaccatcccacatcctccccctccctttcctcatgaaccccagtcgcgcctctgccttctcaaacccctccaccatcccacaccctcctcctgcccttcctcatgaaccccagtcacgcctctgccttctcatccctgcgcgccacacaggctcgctcgtgcccggtgaatgctgaggctgctctgcacgtggagtgtggccctgtgggcaagggctgggctcttggaggtaggggagctacaggggcgactgggaggaggatgttgtgttacacacgcatcagagttaactttgcagtgagagcagccttgctgcggccaaagaacatggaaaagcatgagtggggtgatgtgccttaaagcatcagacacttgggcctcgggcatcaggagccagccacagggatgtctggggaaatggcgttccatgagatgcaagcacacaagaatgcacttggcacatctggggaacagcaggcagctgatatcactgggcccaccccgcaccagggaggatggaagcaggtgaggagctagaccacactgaggcggtggtcgggactcagagtttgctcagtgagccgttcactaggtgcaggggcagttccccgtctgaatttaggtgacgacactcaggtccagccttgccagtctcagcctccggtctccgttccccctctgcagaggtcactttgtctgctgcacgtgattatgaggggttgtgaagtgcttgccccatcagtagccagtgtgcatgtgtaaataccatcctctgtgtgccctggaggctgtccttcagatagcatgtacaggtggcagcatagggcctgtccctagtgagagtgcagggaactcagcaccgtcaactcctcgaccctgcaggtcagattatccttgtagaggccccctggatggcaccaagatcggccctggcaagcaggtgaccctgacttcagagcccttgcctgagggcctggcctggcagctctgctgttagaagcaggaggtgtgcagggggtggggagcagcccagcctctgtgatcttctccatggcaggatctcccagcaggtagagcagagccggagccaggtgcaggccattggagagaaggtctccttggcccaggccaagattgagaagatcaagggcagcaagaaggccatcaaggtagtccccatacccctgtgtcctgaggctactgggcagtccctccatttccccatgcctctgaggccgcccattctctgccctgctgcccacctgtaccttgggctttcttctcgcccaggcttccaactccaccctctcctgccaagcaatcctagccctctgagcctcttagggccccctcagacttgtccctgtgtccacaggtgttctccagtgccaagtaccctgctccagagcgcctgcaggaatatggctccatcttcacgggcgcccaggaccctggcctgcagagacgcccccgccacaggatccagagcaagcaccgccccctggacgagcgggccctgcaggtctgctggctgcgcacataacttagcctgtcacacaccaggaggactggatactggggaggagccggggccaccatagggttctgtcccccagaggaggctgactgggatggggtggcagctgattaggcccagcaccaaatattcaccatcccttggccatcctggccctctcaggagaagctgaaggactttcctgtgtgcgtgagcaccaagccggagcccgaggacgatgcagaagagggacttgggggtcttcccagcaacatcagctctgtcagctccttgctgcttttcaacaccaccgagaacctgtatggccagaaggcagggccgaggggtgtgggcgggaggcccggcctggcttagtggggacccagggcatcagacacaggtacagcacataggccaggagccagggggtgactggggtggctcggctcgggaggcctgggaccccacagtgcacgctgtgcccct

SEQ ID NO: 44853 - DNA, 2300 bp, Homo sapien
cttgccagtctcagcctccggtctccgttccccctctgcagaggtcactttgtctgctgcacgtgattatgaggggttgtgaagtgcttgccccatcagtagccagtgtgcatgtgtaaataccatcctctgtgtgccctggaggctgtccttcagatagcatgtacaggtggcagcatagggcctgtccctagtgagagtgcagggaactcagcaccgtcaactcctcgaccctgcaggtcagattatccttgtagaggccccctggatggcaccaagatcggccctggcaagcaggtgaccctgacttcagagcccttgcctgagggcctggcctggcagctctgctgttagaagcaggaggtgtgcagggggtggggagcagcccagcctctgtgatcttctccatggcaggatctcccagcaggtagagcagagccggagccaggtgcaggccattggagagaaggtctccttggcccaggccaagattgagaagatcaagggcagcaagaaggccatcaaggtagtccccatacccctgtgtcctgaggctactgggcagtccctccatttccccatgcctctgaggccgcccattctctgccctgctgcccacctgtaccttgggctttcttctcgcccaggcttccaactccaccctctcctgccaagcaatcctagccctctgagcctcttagggccccctcagacttgtccctgtgtccacaggtgttctccagtgccaagtaccctgctccagagcgcctgcaggaatatggctccatcttcacgggcgcccaggaccctggcctgcagagacgcccccgccacaggatccagagcaagcaccgccccctggacgagcgggccctgcaggtctgctggctgcgcacataacttagcctgtcacacaccaggaggactggatactggggaggagccggggccaccatagggttctgtcccccagaggaggctgactgggatggggtggcagctgattaggcccagcaccaaatattcaccatcccttggccatcctggccctctcaggagaagctgaaggactttcctgtgtgcgtgagcaccaagccggagcccgaggacgatgcagaagagggacttgggggtcttcccagcaacatcagctctgtcagctccttgctgcttttcaacaccaccgagaacctgtatggccagaaggcagggccgaggggtgtgggcgggaggcccggcctggcttagtggggacccagggcatcagacacaggtacagcacataggccaggagccagggggtgactggggtggctcggctcgggaggcctgggaccccacagtgcacgctgtgcccctgatgatgtgggagaggaacatgggctcaggacagcgggtgtcagcttgcctgacccccatgtcgcctccgtaggtacaagaagtatgtcttcctggaccccctggctggtgctgtaacaaagacccatgtgatgctgggggcagagacagaggagaagctgtttgatgcccccttgtccatcagcaagagagagcagctggaacagcaggtgggaggggtgggacagaggtggagacaggtgcagtggcccagggccttgccagagctcttctccagtcaaggctgttgggccccttattccacccatgggaggtgcacacaaggtcttgttggctgcccctgcaggtccctgtcacctctcacatgtccctgcctaatcttgcaggtcccagagaactacttctatgtgccagacctgggccaggtgcctgagattgatgttccatcctacctgcctgacctgcccagcattgccaacgacctcatgtacagtgccgacctgggccccggcattgccccctctgcccctggcaccattccggaactgcccaccttccacactgaggtagccgagcctctcaaggcaggtgagctgggttctgggatgggagctgggccggggacctccctgctgacacaccttcttccctagacaccccgcactttgtgtttcagacctacaagatggggtactaacaccacccccaccgcccccaccaccacccccagctcctgaggtgctggccagtgcacccccactcccaccctcaaccgcggcccctgtaggccaaggcgccaggcaggacgacggcagcagcagcgcgtctccttcaggtgggagcagctctttgaggccacctgatttctggcgtgctcagtgcactcgggtggattttctgtgggtttgttaagtggtcagaaattctcaattttttgaata

SEQ ID NO: 44854 - DNA, 2300 bp, Homo sapien
tacccctgtgtcctgaggctactgggcagtccctccatttccccatgcctctgaggccgcccattctctgccctgctgcccacctgtaccttgggctttcttctcgcccaggcttccaactccaccctctcctgccaagcaatcctagccctctgagcctcttagggccccctcagacttgtccctgtgtccacaggtgttctccagtgccaagtaccctgctccagagcgcctgcaggaatatggctccatcttcacgggcgcccaggaccctggcctgcagagacgcccccgccacaggatccagagcaagcaccgccccctggacgagcgggccctgcaggtctgctggctgcgcacataacttagcctgtcacacaccaggaggactggatactggggaggagccggggccaccatagggttctgtcccccagaggaggctgactgggatggggtggcagctgattaggcccagcaccaaatattcaccatcccttggccatcctggccctctcaggagaagctgaaggactttcctgtgtgcgtgagcaccaagccggagcccgaggacgatgcagaagagggacttgggggtcttcccagcaacatcagctctgtcagctccttgctgcttttcaacaccaccgagaacctgtatggccagaaggcagggccgaggggtgtgggcgggaggcccggcctggcttagtggggacccagggcatcagacacaggtacagcacataggccaggagccagggggtgactggggtggctcggctcgggaggcctgggaccccacagtgcacgctgtgcccctgatgatgtgggagaggaacatgggctcaggacagcgggtgtcagcttgcctgacccccatgtcgcctccgtaggtacaagaagtatgtcttcctggaccccctggctggtgctgtaacaaagacccatgtgatgctgggggcagagacagaggagaagctgtttgatgcccccttgtccatcagcaagagagagcagctggaacagcaggtgggaggggtgggacagaggtggagacaggtgcagtggcccagggccttgccagagctcttctccagtcaaggctgttgggccccttattccacccatgggaggtgcacacaaggtcttgttggctgcccctgcaggtccctgtcacctctcacatgtccctgcctaatcttgcaggtcccagagaactacttctatgtgccagacctgggccaggtgcctgagattgatgttccatcctacctgcctgacctgcccagcattgccaacgacctcatgtacagtgccgacctgggccccggcattgccccctctgcccctggcaccattccggaactgcccaccttccacactgaggtagccgagcctctcaaggcaggtgagctgggttctgggatgggagctgggccggggacctccctgctgacacaccttcttccctagacaccccgcactttgtgtttcagacctacaagatggggtactaacaccacccccaccgcccccaccaccacccccagctcctgaggtgctggccagtgcacccccactcccaccctcaaccgcggcccctgtaggccaaggcgccaggcaggacgacggcagcagcagcgcgtctccttcaggtgggagcagctctttgaggccacctgatttctggcgtgctcagtgcactcgggtggattttctgtgggtttgttaagtggtcagaaattctcaattttttgaatagtttccatttcaaatatcttgttctacttggtccataaaatagtggctttcaaactgtagagctctggacttctcacttctagggcagagggaacctgaacaagtgaggctctgggttccccattcctaattaaaccaatggaaagaaggggtctaataacaaactacagcaacacatttttcatttcagcttcactgctgtatctcccagtgtaaccctagcatccagaagtggcacaaaacccctctgctggctcatgtgtgcaactgagactgtcagagcatggctagctcaggggtccagctctgcagggtgggggctagagaggaagcagggagtatctgcacacaggatgcccgcgctcaggtggttgcagaagtcagtgcccaggcccccccacacagtctccaaaggtccggcctccccagcgcggggctcctcgtttgaggggaggtgacttccctcccagcaggctcttggacacagtaagcttccccagccctgcctgagcagcctttcctccttgccctgttcc

SEQ ID NO: 44855 - DNA, 1986 bp, Homo sapien
accacacccacacaccacacccacacacccacacccacacccacacccacacaccacacccacacacaccacacccacacacacccacacaccacaccctaaccctaaccctaaccctaacccctaacccctaacccctaacccctaacccctaacccctaaccctaaccctaaccctaaccctaaccctaaccctaaccctaaccctaaccctaaccctaaccctaaccctaaccctaaccctaaccctaaccctaaccctaaccctaaccctaaccctcaccctaaccctaaccctaaccctaaccctaaccctaaccctaaccctaaccctaaccctaaccctaaccctaaccctaaccctaaccctaaccctaaccctaaccctaaccctaaccctaaccctaaccctaaccctaaccctaaccctaaccctaaccctaaccctaaccctaaccctaaccctaaccctaaccctaaccctaaccctaaccctaaccctaaccctaaccctaaccctaaccctaaccctaaccctaaccctccctaccctaccctaccctaccctaacccctaacccctaacccctaacccctaaccctaaccctaacccctaaccctaaccctaacccctaacccctaaccctaaccctaacccctaacccctaaccctaaccctaaccctaaccctaaccctcaccctcaccctcaccctcaccctcaccctcaccctaaccctaccctaacccctaacccctaaccctaaccctaaccctaccctaaccctaaccccaaccccaaccctaacccctaacccctaaccctaacccttaaccctaaccccaaccccaaccccaaccccaaccccaacccctaaccccaaccccaaccccaaccccaaccccacccctacccctaccccaaccctaaacccaaaccctaaccccaaccccaaccccaaccccaaccccaaccgcaaccccaaccccaaccctcaccctcaccctaagcacatgaggaatgtgggtgttatattttgggtatcatgtgtgcattaggaatgctgcatttgcgttccgacgctgcaagtggaccctgcaatgcagcccctccccttgccttgggagaatctcggtgcgcagcattcagaggggcttttgctttcccgttttccgcactgaaccgctctaactggtctctcaccttgattattcatggctgcaaccgggaaacatttttattcaccgttgatgcgccccgagttgtcccaaagccagtcagtggccccaacgtctgtgcttaggggaatgctgctccacctttacggtgacccccaggtctgtactgagcagaacgcagctccgccctcgcggtaccctcagcccgcccgcccgggtctgacctgaggagaactctgctccgccttcgcagtaccaccgaaatctgtgcagaggacaacgcagctccgccctcgcggtgctctgccgctctgtgctgacgagaacgcaactcggccgtcgcaaaggcgcgccgcgccggcgcaggcgcagagaggcgcgccgcgccggcgcaggcgcagagaggcgcgccgcgccggcgcaggcgcagagaggcgcgccgcgccggcgcaggcgcagagaggcgcgccgcgccggcgcaggcgcagagaggcgcgccgcgccggcgcaggcgcagagaggcgcgccgcgccggcgcaggcgcagagaggcgcgccgcgccggcgcaggcgcagagaggcgcgccgcgccggcgcaggcgcagagacacatgctagcgcgtccaggggtggaggcgtggcgcaggcgcagagacgcacgcctacgggcgggggttgggggtgcgtgtgttgcaggagcaaagtcgcacggcgccgggctgggggcgggggggtgcgggggcgccgtgcacgcgcagaaactcacgtcacggcggcgcggcgcagagacgggtggaacttcagtaatc

SEQ ID NO: 44856 - DNA, 1027 bp, Homo sapien
cttctctcctcccccggatctcctaactgtctgaatccacctcttacttgttcccagtttgcgccgtccattttctgaagaacatcttgtagtagctgtctaagaaaaggtgtcaacaaaaagagtcaaactctgtaaaatatttgaagaaatttattctgagccaaatacgactgaccatggcccattacacagccctcaggaggtcctgagaacatgtgcccaaggtggttggggtgcagtttggttttatacattttaggaaggcatgagacagcaatcaaatacatttgagaaatacattggtttggtccagaaaagagacaagtagaagtggtgggtgggggcgagggggtggaggaaagggggttccaggctgtgggtgaatttaaacattttctggttgacagctggttgagtttatctgaagacctgagatcacagaagggaatgtctgggttgtgataagaggtggtggagaccaaagttttactatgcagatgaagcttttagctagcaggcttcaaagacaagagagaacaggttgtaaaatgtttcctccctcctgagtagccgggtctggacctgtgcgcctctgcgcctaagagggtcggggcggtaggtcggggtgagaggtcgtcctgggtgccacccgaggggcgcctcgggcgcggagggggcgtgagcacctccccagggccgcgcctgcccacggtggcggggcacgcccaggtctctggctcctgggctgggtcgcggcaggggcggagcgcgtgcgaaggcgacgcccccagcccctaggcctcgcccaggcggcttccgcccgcctcttcaacgcgcacgctgctaccgagctgcaggaggccgcgggcgcgagactgggaatgcgcagggcccccgcctggctctacaagcccgggccgcggcccccgccttccccgccgcctcccggcgctccgtgcccgccccacgaggccggcggctgctgctacctggggccgttgctgcttgtgccgtgagcgacggc

SEQ ID NO: 44857 - DNA, 1969 bp, Homo sapien
tcagctgctgtgaacacgggtgttcaattacctccttgaggccctcctttcaattttttggggtatatatccagaagtaggattgctagattttaagtggaattttcattttctttagttccttttcagactgttcattgtttgttagtatttagaaatgcagctgatttttgtctattgactttttttttttttttccagtctcactctgtcgcccaggctggagtacagtggagcagtctgagttcactacaacctccacctcccaggttcaagtgattctcctgcctcaacctcccgagtagctgggactacagtcacgtaccaccagtaatttttttatatttttagcagaaacggggtttcaccacgttggccaggctggtcttgaactcttgacctcaagtgatccattcaccttggcctcccaaagtgctgggattacaggtgtgagccaccgcacctggcctgtgtatttaccttgtatgctactacattgctgatttcatttattaggttttttttttaattcttttttaaaaaagaaaaaagagacagagtctcgctctcttgctctgtcgcccaggctggagtgcagtggcacaatcttggctcactgcaacctctgcctccagggttcaagtgattcttgtgcctcagcctcccaagtagctgggaccacaggtgcccaccaccatgcctggctaatttttgtatttttttgtagagatggggttttgccaggttttgccatgttggtgaggctggtctcgaactcctgacctcaagtgatctgcacacgtctgactcccaaagtgctgggattataggcacaagccaccatgcctggcctcatttattagttctaacgtgtgtgtgtgcacacacgccctttaggcatttctacttataagatcctatctgcaaatagagataattttacttctttcttttcaattttgatgccttttatttccttttcttgcctaagtgtgccggttagaacttctagcactgtgttgcatagaagtaatgaatgcagacatccttgtcttgttcctaattttagaggaaaagctttcagttttcaccattgagtgtgatgtggctttttcatatatgacttttattatgttgaggtagttttctctattcttagtttgctgaatgtttttaatcatgaaagcgtgttgaattttgtcagtgctttttctccattaactgaaaaaatcatacatttttggaaatggaaatgcagccacaaataatggccagcctgggctctcctggtgcccacttgccccagccggcctcttacaccccgggctctgctccactctgaggctgcagcccagactgcctgtgccccacacttaccatggatgcagggtcagtgcgcccctctggagctgacagcccagcctgtgcccaggacctttctgccttcccttcccgccgtgtcctgagagctcaccgtgccctctgtggccccgaccccaaggcttgtttgtttcttggcctgctcctccctgccctgcgccatacggaacacacagtaggtgctcactggggagtgaaggaaacgcccaccactgagtggctgctcaggggctgagaaccgaaactttgtttaggttttcttctgtgttttccttgcctcaggtttaaacttttttcttaatctttatcttcacaaaggttgaaaaagatcatctagcaaagccttttttcccagctacatataaggaatttgaaagtcgcataaaatggttaagaaaatgtgccaagattacctcagtaattctggtctgtgttctcaggagaccctggaaataaacaatggtaaggtacaatctcccatggcagaaagagtttccctcagagttagccaaaacaagggccaggcgcagtggcttacacttgtaatcccagcactctgggaggctgaggcagatgtatcacttgaggt

SEQ ID NO: 44858 - DNA, 2300 bp, Homo sapien
cgtgggtgattttaaactaatcaagagcctctttcacgcaggtgattttaaactaatcacgttctcccttcacagaactaaaaagggaggttaatttacacaaacgcgcaggctacagccacccgtcctgcctagggacttcgggccaaaaatgccacctgtcacacctccaatccaggcgctgcagggctgttaggaggggaattagcagctgggataccccgatcctacaaggaggggggttagcaacccctcctgaaataccaaaaaggcctcggcttcctgcagacgcttaaggaacatgccaatcacaaccgatttcctgaaaaacgcaagaaatcctggtgagggctggggttgcaggacgctctgcacaccacgggtaacagttttggggtagcttctctgagaccggctgcctcttactgtcccctggaccaggggggcgccgctctcatcctcctggcatctcccaggcccctgccccactcagagctccaccgcaggggctcccgaggctggactcagacccgctggatcccatccaggcccccaaggcagcagtggagaccctcaaggctggactccagcccctaatgtagactcagggacccctgggatggatgggttcgaacccccaaagctgacttcaggaccctcagagctggactccaccctccaaggcagcattcgggaccctcacggctggactcgaggcccacggcagacatgaagacccctgggaggcgtccgggacccccaggactgaatttgaggcccccaggcagacgtgggggcccctgggcggtggtcaggacgcctggggctggacccaacccccaaggcagacgaggagaacccccgggcggcatccgggccccccagggctggactcaagcccccaaggctagacgtggggacccacctgggcggcgaccgggacccccagagcaggtctcaagccccaaaggcagacgtgggggctcctcggcgacgtccgggacccccagggctggactcaagcccccaaggctagacacggtgactccggggtggcgtccgagactcccacgggggaactccagtctccaaggtagacgtgaggacccccgggcggcatcggggacccccagggcgggactcgagcccccaaggcagacgcggggatgccgaggcggcgtccaggacccccagggcgggactcgggcccccaaggcagacgcggggacgccgaggcggcgtccaggacccccatggctggactcgagcccccaaagcagacatggggaccccctgggtggcgtccgggaccctgagagctggactcgagcccccagggcagacgtggggactcctgggcggcttccggggcccccacggcggctctccaggttccaggacagacgtggagacccctgggcgacgtcacggacgcccagggcgggactcgagcccccaaggcagacgtagggacccctgggcgccgttctcgatccccggggctggagtcaagcccccgaggcggcgttccggactctcgcaatcagacttggactccacccagcgcggaacggggtaggacgggagcgaggacgaggtgagtgaaggcagcgctgccgccgccgccgccgccgccgaggctcggggtcctggcgcctaccgggccggcggctgcaccgcgggatgggtctgccaggagccgcccacgccgaacaagaagcggcccggtcccgcctcccccgccggcagcgcgtgccaatcaccagcacctgatgcggggcgaccaatgaggagcacgccctgccggggcgcggcgctagggagcccgccccggccgcacgccaatcaccaccacgtgacaagggatgaccaatgaggatcacgccctatgctgcggagaggcgctggtgagcacgccccagctgcacgccaatcactagcacgtgacgccggatgaccaatgaggagcacggcctgtgccggggagaggcgctggtgagccagccccggccgcacgccaatcacgagcacgtgatgaggagcggcctgtgggcagcccccgccccaacgttcagcctccagacgcgccatgtgggccctgcgggccgccgtacgcccggggctgcggctctcccgcgtgggccgcggccgctcggctccgcgggcagccgcgccgtcctgccccgcgcgcgcgctagccgctgtcggccgcaggagccccgggaatctggaggggccgtggggcggagggcggggcctgcgggcggacggcggccgaagccgcacgggagacgacgagg

SEQ ID NO: 44859 - DNA, 1255 bp, Homo sapien
ttatataaaatttacttagtgcctgaaactattttatcccagtgctccaaaaggcctaccatgtgcccctaaattcatcagtttttctaactcccatactttttgtccattcattcctgctctttcttcctggacggctccgtctagcatctcttgaaccccatctccaacatgaactgtttgtctatggaacctggtgaatggctgtcaccctggccaccaactacacttctctcctccaccggatctcctaactttctgaatccacctcttacttgttctcagtttgcgccgtccattttctgaagaacatcttgtagtagctgtctaagaaaaggtgtcaacaaaaagagtcaaactctgtaaaatatttgaagaaatttattctgagccaaatacgactgaccatggcccattacacagccctcaggaggtcctgagaacatgtgcccaaggtggttggggtgcagtttggttttatacattttaggaaggcatgagacagcaatcaaatacatttgagaaatacattggtttggtccagaaaagagacaagtagaagtggtgggtgggggcgagggggtggaggaaagggggttccaggctgtgggtgaatttaaacattttctggttgacagctggttgagtttatctgaagacctgggatcacagaaaggaatgtctgggttgtgataagaggtggtggagaccaaagttttactatgcagatgaagcttttagctagcaggcttcaaagacaagagagaacaggttgtaaaatgtttcctccctcctgagtagccgggtctggacctgtgcgcctctgcgcctaagagggtcggggcggtaggtcgcggtgagaggtcgtcctgggtgccacccgaggggcgcctcgggcgcggagggggcgtgagcacctccccagggccgcgcctgcccacggtggcggggcacgcccaggtctctggctcctgggctgggtcgcggcaggggcggagcgcgtgcgaaggcgacgcccccagcccctaggcctcgcccaggcggcttccgcccgcctcttcaacgcgcacgctgctaccgagctgcaggaggccgcgggcgcgagactgggaatgcgcagggcccccgcctggctctacaagcccgggccgcggcccccgccttccccgccgcctcccggcgctccgtgcccgccccacgaggccggcggctgctgctacctggggccgttgctgcttgtgccgtgagcgacggc

SEQ ID NO: 44860 - DNA, 1455 bp, Homo sapien
cggttagatggatccatggatgatagataataataggtaggtagatgataaatggcatagatagatggaataactgactagatagaatatcgtaataaaatgcatctacctgaaattagagaagaaaaagattgtgggactttccactctataaccctggagcaaagaaaatagcattaatgaaaaagcaaagaatgggaaagtaaaatttttagtcagaaccacccttccagcagaaaagaatagtgcaaaaaggctcattgttaggattaaagagtaagtaaaatcaatattgagataggaggatggaggacaccaactgagttccgatcccaatgaagaggagaaaaagctacaactatctaggtgaaatatctacttatcctagaagaagccttttgacagcaacataaaattcatacctataggtttttaattcctatggatgccgtagcaaataacaaaaacttggatggtgtaaagtaacagatgtttactcttttccagtattggagaccaggaatctgagatcaaggtgtgggcaggggtgcgctccccctggaggttctaggagaggatccttcctgcctcttccagctcctggtggctccaggtgtccctgggcttgtggccacatcactacattctctgcctccatctccacgtgaccttttcctctgtgtctgtgtctcctcttctgtctcttagaaggacactggtcattggatttaaaggccacctgggtaatttatagtgatctaatctcaagaatctttccttaattacatgcaaatactctttatccaaattagtttgcattcacaaattctggagcttagtacttggacatatattttggggggttgatggttggaggggcttttattcaactcagtacatcttaataaggaattaatgccccccaacttgccttacaagtcatatattaaaaacaatgttggcctggcacagtggctcatgcctgtaatctcaacactttgggaagccaagggaggaggatcacttgagcccaggagttggagaccagcctggataacaaagggagacccagtttctacaaaatatttaaaaattagccaggcatgatggtgcatgcctgtggtcctagctattcaggaaactgaggtgggaggatcacttgagcctggaagttcaagacagcagtgagctatgctcacaccactgcactccatcctgggcaacagagctggactctgtctcaaaaaacataacactaaaacatcaaaattaaaaaaaaaaaaacaatgaaagtagcctccacttacaaactaattactctttcttgaaaatattacactttttttcttctatatctctactcctagctctcaacacctttcttaagcccacatcataacctgtcttgcataactttgtgagtgcccaacgtttcactgtacaagattgtagagc

SEQ ID NO: 44861 - DNA, 2136 bp, Homo sapien
cgatgatcagttcactgcagtagttcatcactcaaggtccatagatgagaaagtgtctcagtgtccttcaaagcggagtaaaatttcactgtgcataccacattttgctcattcattcatctgtcaatggacacttgggttgcttccaccttttagctattatgaataatgctgctgtgaacacgggtgttctattacctccttgaggccctcctttcattttttggggtatatatccagaagtaggattgctagattttaagtggaattttcattttctttagttccttttcagactgttcattgtttgttagtatttagaaatgcagctgatttttgtctattgacttttttttttttttttccagtctcactctgtcgcccaggctggagtacagtggagcagtctgagttcactacaacctccacctcccaggttcaagtgattctcctgcctcaacctcccgagtagctgggactacagtcacgtaccaccagtaatttttttatatttttagcagaaacggggtttcaccacgttggccaggctggtcttgaactcttgacctcaagtgatccattcaccttggcctcccaaagtgctgggattacaggtgtgagccaccgcacctggcctgtgtatttaccttgtatgctactacattgctgatttcatttattaggttttttttttaattcttttttaaaaaagaaaaaagagacagagtctcgctctcttgctctgtcgcccaggctggagtgcagtggcacaatcttggctcactgcaacctctgcctccagggttcaagtgattcttgtgcctcagcctcccaagtagctgggaccacaggtgcccaccaccatgcctggctaatttttgtatttttttgtagagatggggttttgccaggttttgccatgttggtgaggctggtctcgaactcctgacctcaagtgatctgcacacgtctgactcccaaagtgctgggattataggcacaagccaccatgcctggcctcatttattagttctaacgtgtgtgtgtgcacacacgccctttaggcatttctacttataagatcctatctgcaaatagagataattttacttctttcttttcaattttgatgccttttatttccttttcttgcctaagtgtgccggttagaacttctagcactgtgttgcatagaagtaatgaatgcagacatccttgtcttgttcctaattttagaggaaaagctttcagttttcaccattgagtgtgatgtggctttttcatatatgacttttattatgttgaggtagttttctctattcttagtttgctgaatgtttttaatcatgaaagcgtgttgaattttgtcagtgctttttctccattaactgaaaaaatcatacatttttggaaatggaaatgcagccacaaataatggccagcctgggctctcctggtgcccacttgccccagccggcctcttacaccccgggctctgctccactctgaggctgcagcccagactgcctgtgccccacacttaccatggatgcagggtcagtgcgcccctctggagctgacagcccagcctgtgcccaggacctttctgccttcccttcccgccgtgtcctgagagctcaccgtgccctctgtggccccgaccccaaggcttgtttgtttcttggcctgctcctccctgccctgcgccatacggaacacacagtaggtgctcactggggagtgaaggaaacgcccaccactgagtggctgctcaggggctgagaaccgaaactttgtttaggttttcttctgtgttttccttgcctcaggtttaaacttttttcttaatctttatcttcacaaaggttgaaaaagatcatctagcaaagccttttttcccagctacatataaggaatttgaaagtcgcataaaatggttaagaaaatgtgccaagattacctcagtaattctggtctgtgttctcaggagaccctggaaataaacaatggtaaggtacaatctcccatggcagaaagagtttccctcagagttagccaaaacaagggccaggcgcagtggcttacacttgtaatcccagcactctgggaggctgaggcagatgtatcacttgaggt

SEQ ID NO: 44862 - DNA, 2300 bp, Homo sapien
ttttcatgtgcttattggccattggtatatattcttttgagaagtgtatatctaagtcttttccccatttaaaaaatagggttgtctttttgttgtttaattgtaagaagtctttatgtattctggttaccagaccctcatgagatacaggatttgaaaatcgttttctctcattgtgtttgctgtgttttcactttcttgatggtgccctttgacatgcaaaagttttgacttttattaaaaatggggctgggcatggtggctcacacttgtcatcccagtgctttgggaggctgaggtggaggatttcttgaggccaggagtttcagaccatcctgggcaacataactggaccccatctctacaaaaaattaaagaaaaaatttagctaagagtatagttgtgtgctgcacttcctcaactaagaacataggtgtgtgccacaggtactcaagatgctgaggcgggaggattgctttagcccaagagttttgagacctcagtgagtcaaggtcacgccactgtgctcaagcctgtgtgacagagcaagaggctaactctaaggaaaaaaaatggggtaaacttatactttccttatttaaagttttaactccttaaaaccctgttgaattacagatacatctattatataacttaagagttgatgctataggctgggcacagtggctcacgcctgtaatcccagcactttgggaggccgagatgggtggatcacgaggtcaggagatagagaccatcctggctaacacggtgaaacctcgtctctgctaaaaatacaaaaaaattagccgggcgtggtggcgggcgcctgtagtcccagctacttgggaggctgaggccggagaatggtgtgaacccgggaggcagagcttgcagtgagccaagatcacgccactgcactccagcctgggtgacagagcaagactccgtcttttaaaaaaaaaaaaaaaaaaaaagagttgatgctataaaacttagttaatgaaatatttccctgggcgatggagctcttgcaagtcctgttgtattttttgttcatctttatgccagtcagttagacagttcttctatgtcaagcagaggatggaataataaaccaaaacactgcttagggctttcagagagtaagtgttcagtaaatatattcgataaattactgaattatttttttaaatgatggaaaggaaaatcttgccctctctttttctgggtgttggctagtataaatctttcttgaagtgataatctacatctatgttttgatttctaaggatttcccaaatataagctatatataagtgagaggaaataataacttaggtgcctaatgataatatgacaagataagtacaagggtcagctatttgttgtgaaatagcaatggatataatttaaatatgaatacctttttgctgtttaatcccccaaattttcttttgatttcttttaaaattcttttgtggtaggtaggtttattgtttcttaagaattaacttaagggtagtattttctgatacatttttaagtaacatgaagtttaacttctgtttaaacacatcatatagagtacattgaaagacctcagtattttcgaaatgtttagtaagtaatatcagcagtttccttaaatgatattttaatcctaggtaagtgtacaggtaggttgtgttactcatatttttatattcttagtgaaatagaattcttttttttttttttttttgagacagggtctgactgttgccttggctagagtgcagtggcatgatcttggctcactgcaacctctgcctcacaaggctcaagccatcctcccacctcagcctcctgagtagctgagaccacaggcatgagccacccatgctctattatgagccaccacacctggcctaaaattcgttttctttaatattttttctttctacacccacaactgtaacatttcccttagtttttactttgaatgtgcatactcttacacgacttacagtatggctatattttcagtttgctagagctttacaattaatttaaaacatgaaaggctaattaagggaattctttaaattttgttttaatagtgaaagcaagttgaatacattggtgcagaagcttcatgacttccttgcacactcatcagaagaatctgaagaaacaagttctcctccacgacttgcaatgaatcaaaacacaggtaaattgaaaaagaatgtgctataccttctagtcttttttctattttttttttacacttatggaggtaaccatttattttattc

SEQ ID NO: 44863 - DNA, 2300 bp, Homo sapien
tacatgttaatgtaagcaagtcagtcaattcccagttaaatttcactgattataaatttagtacacatttactgagtgcctactgtatggtaaagaattgtgggtctctgttctcttgtagctaatagtctagaaaaggaatcaaacgtcaaagtgtcttaaaatggtaagtgctagaatataggtaacgggaaatataactggtcaaatggttctgaatgatgaaccactgcatgatttcccagctttttctatacatatctctataaagatgagcaaaatcataaattagcattaactctacattgagatttttgttttctttgttatcccttcctgccttcttactactcatggcaaggattaaacattgagggtggggctggacacagtgattcacgcctgtaatcccagcactttgggaggccgaggcgagcagatcatgaggtcaagagttccagaccagcctggccaacatggtgaaaccccgtctctactaagaattcaaaaattagccaggcgtggtggcgtgtgcctgttaatcccagctacttgggaggctgaggcaggagaattgcatgaacccagcagggggaggttgcagtgaggtgagatcgcaccactgcactctagtctgggtgacagagcaagactccatctcgagagaaaaaagaaaaagaaaacattgagagtgaagatgaggggaatgataaatatgatggcatttaatttcaaacttaaatcctgtcgactaaccatgcttctcttccactgcctcatgatgattagccaaaaaggaacaaactctagctcttttttgtgtgtagacataaattttcatttctataggacaaatgccaaataatgtggttgatgggttgtatggtaaatgtatctttagttgccagatttttttttctttttttttttcttttttttttttttgagatagagtttcactcttgttgcccaggctggagtgcagtggcacgatctcggctcactgcagccaccgccttcccagattcaagagattctcctgcctcagcctcctgagtagctgggattacaggcacccgccaacacacccagctaatttttttgtatttttagtagagacgggattttatcatgttggccaggctgatctcaaactcctgacctcaggtgatctacccatctcggcctcctaaagtgctgggattacagcatgagccactgcgcctggcttttttttttttctttttttctttttttttttttggagacagagtcttactctgtcacccaggctggaatgcagtggcgtgatctcagctcactgcaacctctacctcctgagttcaagtatttctcctgcctcagcctcccaacgtgctgggattacaggcatgagccactgcacctggcctaatttttgtatttttaataaagacagggttttgccatgttggccaggcttgtcttgagctcctgacctcaggtgatccacccacctcagcctcccaaagtgctgggattacaggtatgagctggcctcaattaatttcaattcctagactcttcttatctttcatcctaataatttatctgattgtgttatttaccaagtagcttttgcactttagatttttaaaaatgaattaatattgtatttctgctttctttagggaatacacttctgtcttgtctttgaactcttagaagtaatttagggtatggaaagttattgtagaggcgattagctatatatttccaatgattgttgaaagagttttgggataagaaacaggcacaaagtatgaagcggagtcaggtaattactacttctcatgaaatccctaacttgggataaggcttctcttatgccaaaacaagatttgtcttaaccctgtcagcagagtctgacctacttgtcagtgttttttattatttctcccattggaaaacctgctattgcttgcttggacctgttttactgatgataaacgagattgctttcaaaaattgttttatatgttatctttacgaatctcattgcatccaggcaagctgatgaagaattccagatcctggcaaactcctggcgatactccagtgcattcaccaacaggatattttttgccatggtggattttgatgaaggctctgatgtatttcagatggtaagatctttggtttattctgctatataaaaataggtaaaatatagtgaaagtggaatatatttttttcagtggctataagacattaaatgggattgctcttatgtaagatctagagtagcaaactaaaagtta

SEQ ID NO: 44864 - DNA, 2300 bp, Homo sapien
agaatactaattgagatgtgagggtaattttgctgggacttctgttaattatttgatcagcagagttgattcaatagcagtgtcatgtgcctgtagtcccagctactcagaaggctaagacagaatgatcacttgagcgtgggagtcccagaccagactgggcaacacagtgagaccccatctctaaaaaaatgaaaaaataaaattattaattagtgtctctattcaggagatattttaacttgaggttattctatttccttttgtcataagactaacgggtctctcagtgtttctcactttttgttattgatacccaaagattatcatgtacgtaccaaaatgctcttttatctgttaaaaccaacatactgcttattgattaaaagtaaatcctacttttctttcagagactaatagattggaatatatttttgtttcagctttctgatgagttaaaaaggtcccagagatatatagacactggagtactggaaattgaaaaacgaaaatcgtgtgtgtttgaaaagaagaatgcaacttgtatattttgtattacctctttttttcaagtgatttaaatagttaatcatttaaccaaagaagatgtgtagtgccttaacaagcaatcctctgtcaaaatctgaggtatttgaaaataattatcctcttaaccttctcttcccagtgaactttatggaacatttaatttagtacaattaagtatattataaaaattgtaaaactactactttgttttagttagaacaaagctcaaaactactttagttaacttggtcatctgattttatattgccttatccaaagatggggaaagtaagtcctgaccaggtgttcccacatatgcctgttacagataactacattaggaattcattcttagcttcttcatctttgtgtggatgtgtatactttacgcatctttccttttgagtagagaaattatgtgtgtcatgtggtcttctgaaaatggaacaccattcttcagagcacacgtctagccctcagcaagacagttgtttctcctcctccttgcatatttcctactgaaatacagtgctgtctatgattgtttttgttttgttgtttttttgagacggtctcgctgtgtcacacaggctggagtgcagtggcgtgagctcggctgactgcaaactctgcctcccaggtttaagcgattctcctgtcacagcttcccaagtagctgggatttacaggtgtgcaccgccatgccaggctaatttttgtgtttttagtagagacagggtttcgccaagttgtccaggctggtcttgaactcctgggctcaagtgatccgcccgcctcagtctcccaaagtgcgaggatgacatgtgtgagctaccacaccagcaatgtctatgcttctcgatagctgtgaacatgaaaagacatctattgggagtccgaggcaggtggattgcttgaggccaggagttagagaccagcctggccaacaaggcaaaaccccgtctctactaaaaatatgaaaattagctgggcttggtggctcatgcctataatcctagctacttgggaggctgaggcacgagacttgcttaatacctgggaggcggagattgcagtgagccgagatcacgctactgcgctccagcctgagtgatagagtgagactctgtctcaaaaaaaagtatctctaaatacaggattataatttctgcttgagtatggtgttaactaccttgtatttagaaagatttcagattcattccatctccttagttttcttttaaggtgacccatctgtgataaaaatatagcttagtgctaaaatcagtgtaacttatacatggcctaaaatgtttctacaaattagagtttgtcacttattccatttgtacctaagagaaaaataggctcagttagaaaaggactccctggccaggcgcagtgacttacgcctgtaatctcagcactttgggaggccaaggcaggcagatcacgaggtcaggagttcgagaccatcctggccaacatggtgaaaccccgtctctactaaaaatataaaaattagctgggtgtggtggcaggagcctgtaatcccagctacacaggaggctgaggcacgagaatcacttgaactcaggagatggaggtttcagtgagccaagatcacaccactgcactccagcctggcaacagagcgagactccatctcaaaaaaaaaaaaaaaagtaagaaagaaaaggactcccttagaatgggaaagaaaaatcataaaatattgagctgatgcctgt

SEQ ID NO: 44865 - DNA, 2300 bp, Homo sapien; identical to SEQ ID NO: 43338

SEQ ID NO: 44866 - DNA, 2300 bp, Homo sapien; identical to SEQ ID NO: 43339

SEQ ID NO: 44867 - DNA, 2300 bp, Homo sapien; identical to SEQ ID NO: 43340

SEQ ID NO: 44868 - DNA, 2068 bp, Homo sapien; identical to SEQ ID NO: 43341

SEQ ID NO: 44869 - DNA, 697 bp, Homo sapien; identical to SEQ ID NO: 43342

SEQ ID NO: 44870 - DNA, 2300 bp, Homo sapien; identical to SEQ ID NO: 43343

SEQ ID NO: 44871 - DNA, 2300 bp, Homo sapien; identical to SEQ ID NO: 43344

SEQ ID NO: 44872 - DNA, 2300 bp, Homo sapien; identical to SEQ ID NO: 43345

SEQ ID NO: 44873 - DNA, 2300 bp, Homo sapien; identical to SEQ ID NO: 43346

SEQ ID NO: 44874 - DNA, 2300 bp, Homo sapien; identical to SEQ ID NO: 43347

SEQ ID NO: 44875 - DNA, 2300 bp, Homo sapien; identical to SEQ ID NO: 43348

SEQ ID NO: 44876 - DNA, 2300 bp, Homo sapien; identical to SEQ ID NO: 43349

SEQ ID NO: 44877 - DNA, 2300 bp, Homo sapien; identical to SEQ ID NO: 43350

SEQ ID NO: 44878 - DNA, 2300 bp, Homo sapien; identical to SEQ ID NO: 43351

SEQ ID NO: 44879 - DNA, 2300 bp, Homo sapien; identical to SEQ ID NO: 43352

SEQ ID NO: 44880 - DNA, 2300 bp, Homo sapien; identical to SEQ ID NO: 43353

SEQ ID NO: 44881 - DNA, 2300 bp, Homo sapien; identical to SEQ ID NO: 43354

SEQ ID NO: 44882 - DNA, 2300 bp, Homo sapien; identical to SEQ ID NO: 43355

SEQ ID NO: 44883 - DNA, 2300 bp, Homo sapien; identical to SEQ ID NO: 43356

SEQ ID NO: 44884 - DNA, 2300 bp, Homo sapien; identical to SEQ ID NO: 43357

SEQ ID NO: 44885 - DNA, 2300 bp, Homo sapien; identical to SEQ ID NO: 43358

SEQ ID NO: 44886 - DNA, 2300 bp, Homo sapien; identical to SEQ ID NO: 43359

SEQ ID NO: 44887 - DNA, 2300 bp, Homo sapien; identical to SEQ ID NO: 43360

SEQ ID NO: 44888 - DNA, 2300 bp, Homo sapien; identical to SEQ ID NO: 43361

SEQ ID NO: 44889 - DNA, 2300 bp, Homo sapien; identical to SEQ ID NO: 43362

SEQ ID NO: 44890 - DNA, 2300 bp, Homo sapien; identical to SEQ ID NO: 43363

SEQ ID NO: 44891 - DNA, 2300 bp, Homo sapien; identical to SEQ ID NO: 43364

SEQ ID NO: 44892 - DNA, 2300 bp, Homo sapien
ggtcaggagttcgagaccagcctggccaacatggtgaaaccccgtctctactaaaaatgcaaaaattaaccaggtgtggtggtgcatgcctgtaattccagctactcaggaggctgaggcagaagaatcacttgagctcaggaggcagaagttgcagtgagctgacatcacgccactgcattccagcctgggtgacagagcaagcctgtgtctcaaaaaaaaaaaaaaaattaatggtgaaaactgcaattacttttgcaccaaagtaatacatctgcaaagatcttatctccaaagaaagtcacattctgaagtactgaagggttgggcttcaatatatgaagtttgcgggagaaaaaatgcaactcataatatatccattcccacgtctttccagcccctggcaaccggcaatgtgctttctgtctctgcagatttgcctgttctggacatttcagagaaatggaatcctacacaatgcgttcttctgtgtctgttttctctaactcagcatccagtttttgacgtccatccactttgtagcagatgtcacggtgtcagtcctctttagggtcaggggactttgaaggaaatatctttctaaatgcatcaactgcttcctggactctgccactcagagcttaggactgcacaagctaactgccttagagcatttcccccatatgcacacacacacacacatgaacacacatgcacacgcacacatgcacacgcacacacgcacacacacacagacagacacgtgcacacacacacacacctgtgtgcacaggaacttaatccatccaagtaacttacctttataaagatgttgcagtccaggcgcgatggctcacacctgtaatcccagcactttgggaagccgaggcaggtggatcacttgaggtcaagagttcaagaccagcctggccaatgcagtgaaaccctgtatctactaaaaatacagaaattagccgggtgtggtgtcgggtgcctgtaatcctagctactcgggtggctgaggcaggagaatcacttgaacctgagaggcggaggttgtagtgagttgagatcacaccactgcactccagcctgggcaacagagtgagactctgtctcaaaaaaaaaaaaggaagatatttcatagaagacaactcccaaacaccaggtcaacaacatgaacagacttaacactccagatgctcaaatttgcagagagaaaagtccaaggtttatttctccttttgggtctgtttgccatgaatcctgcttctctgggaatttagaagctgccctcataactaagactgattttcccctttctcctgcagttaatctatttaccagaggacttcaaagctgtttgcaaatggtaactttttaagtgcttgcctactgcttcatggtaggtagagtgtaagggttaacccacgagttgtatatggataaattagacacactcacagatctgcagggaagaatataattaaaaccattgtgaaagcaggagtcatcatcgaactcagctatccagtcatgtttcttctccaaggagatttcaaacagaagatgtaaattttggtagttacataaaatgtctcagatttaaatgaaagacacaaaaagccacatatctccttttcctgaacaaccgtctctgctgaaatattagttctgccacctacaaagacaactgaaggctgaggataaaaaatgcctcttggaagtcactgagtttgttaggtataaaagccaagacttcaactgaggtctttgcactgatgtgtacattaaccccacactgggtatcactgtacaatcatgtcctgcaggaggaagattacaggcggccagtgtcttctctggtttctgggttggtgactttgaacttgctacagctcccacacccgcagcgagcagagttgccaagcaagtgtgccggcttccagaagcctgagatgcccattggtgcttgggaaccaccccagtttccccatcgtctgtgctgctgcagattggttggggcagcccggggaggctggctccgacacacgactgagtgtgcctacactggtcccacaggttttcagctgtggagtttgggatctgagcttggagcccatttgtttctggcagttccgctcatattttccacttgaagacatcgcctcccttccttccaagctgggagaccagaagtcaacaacaggagggtggagaggccgggtctcacaatccgcttggctggggagtccactgaggttcttgcatcctgaagcaaaccatggagagctggtggg

SEQ ID NO: 44893 - DNA, 2300 bp, Homo sapien
tagccgcctagtcgccgctctccatcctcgctcctgtgcgacgccactttatccctcttaaactggacgattcagtagtaccggggaacgaaggcaacaagacctaaccatagcaacaacattttgtttttgaaacccatcttgcaactgcctgactgcaaaatgtacttgcagattctgcagacaaaaattgctgccacttattaaaagacttcatagtgaaaactgactttttacccaaaccactgattcaaggacttttgcgtagaaactcatgaactgttaagataacccttcattaccaattaagataataggttgtaagtaacctaatgagtaccaactttctcttatttcctttaaaaactgtctctcaaaacagccggtcacgacacaatgtcagatgcttctggaatctgtttctctaattacagttctaaaactgccaacaaactccttatttggacttcagtttctctgactctttggttcaccatgttgtgcagccatcacctctctctagttccagagcatattttatcaatcctcaaaagaaaccgtgcatccaccagcagtaactccccacaacctctttcatccagtccttagcaaccattaatctggttttagtctctattcatttgcctttcctggatatttcatatacatgggatcattcagtatctggcctcttgtatctgactttttcacacagtgtaacattttcaaggttcacctatgtggtgccttgtgtcattttttgctattttcatgtcaggttttgaaatggtatgttttttctcatcttgtaagggatttcctgttgtagaaaatctgtttctgtgtatgactgcaatttaaccattttatttgctatccagatacatgttttaacttgagccaactatatttccactttgtataatgaatactaaattttgtatcttagatactaaactttagtagataactaggatacaaattacagttttcatatttttcttttcatggaatataattttttaaagtttctgatattaattcattataacatttactggacaaaccaaccacatttggttctatgaactcttttcatattttacgggatttttattttgttgtcttaggaattgtggcatcattcagttttgctgagagtttatttttattaataggttctgtgtactatgcaacctgtagttgttactcctgttttgcaaatatggcattaaaacattggtgagtggggggactttcctcccattttatttcagcaaagaaatcttgtcatttctcttcagactttaagatttattgaggagagttattcacttgtttagtctggtaaactgtgacctttaaattttgaaggaggttgaactaaaaggtgaaatatgataaattgatggctctatttgttgtgaatggaaatttaatttagacttgtaaaagattgttttttaaattgctaattgtgtgacagtgaagagaatgacttcaaaatatcccactatacaatctgcaaagaaaagaattgtgtcccctttttagtgtagcttaacacttcactgaaactgttttgagttcttaggtcatatttttttttctctaaacgaaacaattacttttctaaaagtcaaatgttagccatcctagaagttgggcataaaatacttgtaagtatatgctaatattctgatacttaatgcctgtgaaaaatgtgtatagaattttcaatttttaaatagaagtgaagaaaaagcgataataattactataaattcaatatgcagttatgtatgtatgtgtgtggttaagacaattaggttctcattaagctttgtttttttaaagataacatacacatatattgataatgataaacaattcatatagctttttgtgtcctctcgttttgtgacataaaaggtcaatgaaaaaattggcgattaagtcaaattcgcatttttcaggacagcagtagagcagtcagggaggcagatcagcagggcaagtagtcaacgttactgaattaccatgttttgcttgagaatgaatacattgtcagggtactagggggtaggctggttgggcggggttgagggggtgttgagggcggagaaatgcaagtttcattacaaaagttaacgtaacaaagaatctggtagaagtgagttttggatagtaaaataagtttcgaactctggcacctttcaattttgtcgcactctccttgtttttgacaatgcaatcatatgcttctgctatgttaagcgtattcaacagcgatgattaca

SEQ ID NO: 44894 - DNA, 2300 bp, Homo sapien
gtttggccagatatgaaattctgggttgaaaatttttttctttaagaatgttgagtattgacccctactctcttctggcttgtagggtttctgctgagtattccactgttagtctgataagcttccctttggaggtgatctgacttttctctctgctgcccttaacattttttcctgcatatggaccttatagaatctgatgattgtgtgtcttggggttgatcttcttgtagtatatcttaatggtgttctctgtatttcctgaatttgcatgttggcttagagtagccatggttaaaaatctaatgaaagtttatagttaacaaggatatttggatatttcatttacatatagcattttaagataaacacaagaataatgactgatattagagatctatgaatttatataattttgaattttttttttttgagatggagtctcactctgtcacccaggctggaatacagtgtcacagtcttggctcactgcaagctccgcatcccaggttcacaccattctcctgcctcagcctcctgagtagctgggactacaggcacctgccaccacgcccagctaattttttgtatttttagtaaagatggggttcaccatgttagctaggatggtcttgatctcctgaccttgtgatccacccatcttggcttcccaaagttctgggattataggcttgagccaccgtgcccagcctaattttgaaatatttatattaacccgtaagtgcaatgaaaggaagatctagtattggtcaggtgcgcaggctcatgcctgtaatcccagtactttggaaggtcaagacaggtggatcacttgagggtcagcagttcaacacccgcctggccaacatggtaaaacctcatctctactaaaaatacaaaaagtagctgggtgtgattgtgggtgcctgtaatcccagctaacttaggaagctgaggcagaagaatcgcctgaacccagggggagaaggttgcagtgagccgatatcttaccactctactccagcctgagagacacattgagaatacatctaaaaaaaaaaaagatctagtattacatatttctgtctcagtgcagttgtgttgctgtaaaggcatatctgattctgtgtaacttacaaagaggttcatgtagctcacagttctatgggctatatatgaagcttggaattaacatcagcttctggtgacagcttcaggctgcttccactcatggaaaggaaaggggaggcagcctctgaagagattatatggccagagagggaactagagaaatgacaggggcaaggggaaagagagggaggggccagcctctttttaaccatcaactcttgagggagatgatagagtgaaaactgattcgctgtcctctcccagaaagggcattaatctgtacacaagggacccacctccatgacccaaagatgatccattaggctgcacctccagcgttggggataatatttcaacaggaggtttggagggtcaaatattcaaacaatagccatttcttatgtaatttatcaaataggcctaatcatctaatatctccaaaaggtgagagatatgtcttttgagtcttttcaggggcccaactggaaaattcaaacattaattctaggttaaagggatttacatttagcatttgattttgggcaagtttgccaaagatgttaaaaggcacagaacacttgattgaaacaaactcgtaggtcacttaaaaaaaaaagtagtcattttttaaccagaaggataatcaaaaaacaaatttaccagagttagccatggtatcatggctatccacattatccacaaaaaataccaaaacacattatctgcgaaaaacacaaaaattagccaggtgtggtgtgtgcacctgtagtcccagttacttgggagggtgaggtgggaggaccacatgaaccctggagatggaggtttcagtgagtcaagatcatgccaccgcattccagcctgggcaagagagtgacaatttgattcaaaaaataaatatataaataagcaaggaaataaataaataaataacattgttgttgttgttttcttttcaacttttattttaggttcaaggggtacgtgggcaagctggttacataggtaagttgcatgtcatgggtattttgtgtacagataattttgttactcaggtaatcagtgtgatatctgataggtagtttttcaatcctcctcaagtaggccctggagttcttaattcatagctaccatttataagtgaagaacatgggggtatttggtttact

SEQ ID NO: 44895 - DNA, 2300 bp, Homo sapien
gggaaacagccactgaaagaccaaaaaagaaaagaaaaaaaaaattataaaagacccagataccttaaacaaactgagcagtggtgatttggtgcctccacacggaaactcctagattcactgcccacagccagaaacctgcagttgcctctgtgtttaggcactgcccaccaagggtctcaaattggaaagcgcagaggttctacgcccagccatgcacctcaagatctttactccaaagcagttctgtttaatttcaccctggcgacctacattggtagctcatcttcacaggtgcaagacagaaagtcctccatgtgcacatctgcaacaaatgcctatctcattgtttcctctgctacactgtttatgtaaaaatacagactcactgagccagactatgaaagtaattgactattcctctacccttcctgttttttttttttttttttgacagagtttccaaagcgattctcctgcctcagcctcctgagtagctgggattacaggcatgtgccaacacgcccagataatttttgcatttttagtagaaacagggtttctccatgttggtcaggctggtcttgaactcccaacctcaggtgatccatctgcctcagcttccaaaagtgctgggattacaggtgtgagctgccacacccggcctctacctttcctgttacagttaaattgtgtatttagtgaaaggctgatcagagacccaaaataatgcaaccatttgtctcttacgacatcaaactctaccttcccactgccccagccccccaccaagccaccccaatgtcctgcaccatgtacatcttacatcttgccttcctaaaatgtatgaaaccaacctgtgcactggccgagagagagagagagagagagagagagagagagagagagagagagaataaccagaaaggaacacaaggaaacttttggaggtgatggagatgttcattacctcgattgtgatggtggtatcgtggatttacgcctatgtccatactcatcaaattgtacacattaaggaagtgcagcttcatttgactggttgtttttttgttttaatttaatttaatttagtttattttgagacggagtcttgctctgtcacccaggctggagtgcagtggcgcgatctcggctcactgcaagctccgcctcccgggttcacgccattctcctgcctcagcctcccgagtagctgggactacaggcgcccgccaccacgcccggctaattttttgtatttttatttttagtagagacgaggtttcaccgtgttagccaggatggtctcgatctcctgacctcgtgatccgcccacctcggcctcccaaagagctgggattacagaagtgagccaccgtgcccggcctggctggttgttttttgtatatcaattctgtcaggcggacgcgcgtgaaaaattccaatggaagctgtgaccacacacacgcctgcgcagtacaacttacatagcggacttcactctcttaaaagtgaattgttttgcaggttttacgacatggacagagctgtgcagccatcatcacgagctaatccaaagcaaggtattcgacttaaaattcaaatgccatgaaacctatcctttcaatgtttacggtacagacgattttagtactttcccaaacctatgaaattggccccaatcctgaacaaggaatgatttgtctctgaaacaaatcatgattttgcaatcacagcatgtcacagtcacaaggaatcatataggttatttctcacgattggcatttttttttaaggctcctaaatcgtgctgtttcaggacttttgctaaatattttgaaggtcggcgaaagataagtttaagagtgtaaactgcgtcctcccagctcagccaacttgacggggggtaggcacaacaaaaagtcctgcggcataactgacacctgtaaatcagtatcagaaactgaaaatgctaagaaattcagttccaggatatgaactctacagcggaagaataagaaaccggaactaaacttctcactcatctgacttcctgcggtttacgacaacagactttggttgcaccggaaaagaacagattctcttccgtcgcagagtttcgccatggtaagaccgatagttcctaactcctagtatatctgcctccatcatttgaaaaagggccgttctaccttggcgatgtttcacttttcggtcgcccctacttggtgggtgggaatgctgctggtgctgcttcaggaaacccgatttggagaggggaggtctgagaagagtgtgtc

SEQ ID NO: 44896 - DNA, 2300 bp, Homo sapien
ttacagctgtaatcccagtgctttgggaggccatggctgttacactgaactagagagttcaaggctgagtgagctacgaaggtgccactgcactccagcctgcgtggcagagccaggtaccatctctaaaaacttgaacgttatcagtattttgaaattatgttaattacatatgaaattaggctagttttttttactgaaaaacataatgtaaaaatacttttctttcctcaaaatacattgtcttaacttgatgaaaatttctcaaacaagattttatttatttaaatacaagatcttgctctgtcataaaggctggagtgtggtatcacaatcatagcccaaacaaatgggcttaagcctcccatagctgggactacaggcgtgttccaccacacccagcacttttcaatttttttgtacagatggatcgccctattttccaggcttgtctccaactatcagttgagcacaagctgattttatctcagccttccaaagtgttttggaattacaggggtgagccgcctctcatttatcatttttgaaacaaaaggtaacgacttgagaaaacaaggtcaaaccaatggtttgaaaagagaattgctatccagcacttaactcattatatcaactatgtaccactggttttcctttcgtaaagcattttatgatttttaggtttctcagttaaggacaagatgatttctgagttttaaaaataggtatgctagaaaactgaaatacctggcctctacatttagagattaccggctctggcccacaggctgcagtgcagtggcttgatcacagctgtccgcctgtatctgctggcctcaagcgatactccagccttgtcctcccaaagcgctcagaggtgagcgaccgcgataggcatgtttaactttttagtagcaacttttaaacacagtttgggtacctagtttaatgggaaattagagtgcattaaaacgtaaagtaatgaaaacgcacaatacacgtttttggagttcatcagtactatctgtttaatcaaatgcattttcctctcagtctctaaagcctttttaaactttaagaggataaataattttgtaagaagacaatcccaaaaccaattgttagtttacatttattaaagggtgtgcataattcattgttcatgagacaattacacaaaactgacatttcaaggatgccaaaagatgaaacactgccataaagaacacacactagacattacaaatcttggtcaaaatacctacgttaacgcaaaaaaaaaaatcaattggctcagtaattgattaggataatcctcccctcctcttgcctgtacactgtggcaagtccatttactttctttttttttttttttaaagccaacaaaggagacagtggggaatgctatatgtctgtatctgctttcctcctcaaccctaggaataaagtaaacacgtttactgagggcgggggtctaagggcctgcaacaatgagatctgtcgccttggctaggactggcgccgagaggcgataggtctcgggagagcctggcgcagggtgtgggagattaggaatcccaggtccaccggagatggcagggggtggcctggcccggtgcggggccgcttgcctgcacgcaaccaactaaggcggtggtgcgcaagtagtggtgacggcgggcgcgcggagaaaaggaacgttgtgacggaaactccagctgccggagaccccaccgcagtgaggtcactggactccccggactcggggcgtgaccggcgccgacccggggcgccgagaggcccaccgggcggagggggcccaactaccatcccgcattttcctgggtctctctcccgggcggtgacgtgacgtgctgacggcgggcccgtgccggggagctgggccgctttttgtcagctccgaactcggcccctcctccctccctccgcccgccctaccagccggagcccggcccagtgctccagagaaaggccgtcctgcagcacccgccgctgtcgccgaccgcccgcacatccgtcgggtgagtcccgcgtgcccccgcggccgcggggcctagtgcgcgcgcagtaacctgtttgtggcctggtcggcgtcccgtagggcgccctcccgcgctaggccggccggcgtggcgctcggcgccgaacaggccccgaggaggccgcagttaggcctagtgattatccagttgccctgagcggctgcggaggtgcgctccataagcgggcagggtgggaaaagttcgcccgtttgtccggaaggcagttgatggacctgg

SEQ ID NO: 44897 - DNA, 2300 bp, Homo sapien
atctgcaattcgttaaatatgtgcaattctacgtcaatccttgagcagaggcctgaatccccatacatagaaagaacatataggagtaataagtgagggagggtaagttactacaagtcatgctgacgcacaaaaatactttcagcgagcatgaggcataaatgtgttggtgagaaacagttgcaggaactgagtttttactatgcatagaaaatcttatcttctgtgtttcaaaagcccaaaagtccagtggaaatagaagcattcttttctagagtattccaaaggagaccttcaattgtacccaacatacccaattattggttattgggagctttactaagttgttcattagatttgattgtgttattcagtaggtctcccttacaataaattttaagtgatgaaagtcagtaccagtaaggaagattaccaacagccaaaggatcagtagacaacattctgaaatccagcccagtgacaagtaagaactcttaagggcaaaaggaagctgtggataatatatgctgcttcagacgatagctaggactctgcaaaatatatgaaattaaaaataaataataccatacagtattattaaggagtcagagttgatgctggtggtaattgtcttcaaagtgaatcacagtgttcttgaaaaaagtcaagccttatttttcagctactagaaatgaaaatttgaaatttacaaattattttcatttgacttatcgggtgatttccacatgctggaaatatcaagaaatatttggccggctgcggtagctcacacctgtaatcccagcactttgggaggctgaggtgggtggatcactggaggtcaggagtccgagacctggcaaacatggtgaaaccctgtctctactaaaaatacaaaaattagccgggtgtgggggtgcacgtctgtaatcccagctacttgggaggctgaggcaggagaatcacttgaacctgggaggttgaggttgcagtgagccgagattgcgccactactgcactccagcctgggtgacagagcgaaacttcatctcaaaaaataaaaaatttaaaaaattaaaaaatatatttaaataaactgtctgtgatggccattatttcttgaattctatcttattccacttattccacattactaaaagatccctgaatttctgactgaagtttaaagagaaacatcacaactagatatcagagtccaaggaagagacacaaagacctcagtggtactgacaggcaatagcaaagtcattcgaaagacaaagattttggctggtcgtggtggctcacgcctgtaatcccagcactttgggaggccgaggccaaggagggcagataatgaggtcaggagatcgagaccatcctggctaatatggtgaaacccgcctgtacaaaaaatataaaaaattagccgggcgtggtggcagatgcctgtaatctcagctactcgggaggctgaggcaggggaattgcttgaacctgggagatggaggttgcagtgagccgagatgccgccattgtgccactgcactccagcctgggcgacagagcgagactccatatcaaaaaaaaaaaaaaaaaaaaaaaaagacaaagacaaagattttaaggccatagagaagaaaaatttaagcagcaaggcatcaaaagcaaaagtctagttcaaaattattattaatatctgctttgaacatggaagaatggaagaggggagtcaacgtacagtagttacactcttttattgagtttagtagctaatcaacaatttgttcctgatatatctagatgagccagtgagacaattataagtaataacgggaagaacaataccagagtaaaatcaaataggaagaaagtgataggcgtatttacactaatagaaatagagtccgtcagttagtggaaactggtgacaacagcagagaaaactctggagagctataaactgcgtgaaatgaagtgcattggaagttacagaaaatacgcaagaacaatgggagaagaactccaggaagtgtaggggaggggcagcgtggagaagaaaggatgtgacgtcactgagataaccagctcggctgttagcaactctgttagcaaagctgtttgtctttctcggaaacaacaggtgagaattccccttacagacctgcccatgctttctaaagtggctctcccaaacctacctttgtcctaactcagttgtctgtgattctcaatatagtaacgataagcctctttgaatatggaggccgctgcagacggcccggctgagacccaaagcc

SEQ ID NO: 44898 - DNA, 2300 bp, Homo sapien
aaacggtgacaaaatagttctcttctcctgcctagggattaaatggaaatcttcagaaatcaattaattgatatctaatgtggatgttatgaataattcttagtatttgaaagcactcccatagcatgcctgtgccacactgtccctggatcaatcagtgattttatttgcattgagttcctgccatctcccatgacacagtctcatacagtattgcaatccccaagagtcagagctgtaaccatttagcagcttctgatttcccctctcagacatttcctagctcccaagaagagtacaatgcatgtgctggatactgtgaataatgaagggacagttacaggaggagcaaaatgtaatagtgaagtgtctcctcacacctgtgcaagtaaatatttctctgttttctttcatgcagacctgcattgagctgcggtgctgatgtttctcctagtagcatggttttcggtataaaaatatgcaaaaaagtgacgtgaggaatatttgaaccaaggatttaaccttcaaaatatcaggaatgggaaaggaggcagctaagaagatggagaaggatatactggggaaataagtcataaggatttgcctttcagttaaaaaactttccctgaagcagctattagagaaaagcaacttattataattctgaaaatttttccttcttgatgttctatctctatgcagatgtcatctcctcttctattcagtagacaaaaaataaaaaatggatactgtgttattggtgctctgaaacattctctactttttctccttttatttcaggaaaaagagccacctactttcaaataattgcacagccccagaaagataagtttttctacaggataagcacagaaagtggattttccccataaaatcgtacacctttctggagagaggaatttagaaaattcacctggttaattttctggcgtctgggtaaatttaaggagttgttccttgaaacaagaataagagttgaccagctggggtggttttgatgttgttactactggttttttaatcacatgccaggaacgggagaattggcccctacttccttatatccacgacccttcgaaggcataaaccagccacattcctcctggtacctttagtggtccttggggacctggcacccggatgcccacccagccgtcgcccaccaggcagccagagctggctggcaagcaccaggcatgaggctccgggctggtttcctccctctcttgccccctttcctaccttggaaaagcgccgtccatgcccgcgacgctgcctggtctctggcagcaatgccacctgactcactcctgcttgctgtctggggtagccaaatgctaggtcgctagaacttctccttccctccttcacacacacacacacacacacacacacacacacacacagcccttcgctgctgtcagaggattaatctggaaaggcgatcgaagtaccagaccccgctcacagttgagtatgatatatgcggacagcctctcagctcaaactgtgactttgccaggcttctgcccctactacccctagtctgccttaagtatcctttgtatgagaaaacggtgctgtgggatgcttgttctctagctggagtcggcagccagcggtatcacaagaaaaacacacaagaaaaatcaaacttctctgagaaaatgtgaatgggtgaaacttaaagggaagcctaagagaagagtgagcagaggaccgaggagaacattgtatgcacagggttttgctcaggaaagctagcagcccgaaagcggcgcgttttcttcagcagcgggtcccgcacgcgagagtgctgccagcacgctttctgcctccttctccaggaggcgagcagtaacttcctaagcttacctccatctctcccccgcccttcttgctggttctccgtcagcggggaggggccgcccccggatcgatgggggatgtgaggtgcagggagtggggaccagaggggggtactcagcagttggtgctgcgccatcccttcccagcaggcggcccggacactggttcacttctctccccacgccttcccctggttcaccccccttccttcccctttctccccctctgttaagtccctccccctcgccattcaaaagggctggctcggcactggctccttgcagtcggcgaactgtctgggcgggaggagccgtgagcagtagctgcactcagctgcccgcgcggcaaagaggaaggcaagccaaacagagtgcgcagagtggcagtgccagcggcgacacaggcagcac

SEQ ID NO: 44899 - DNA, 2300 bp, Homo sapien
taaaggcatcgttattaggtaagtaaccggactgggtacctgtacagggtgctgtcagggaggcgtgaggtccacacttagtgcgcggacactgcccgctgcctgcccctgaggtctgaactatgacaacggggtggttttaaagacgcttctgctattctcccttcccccttctcttcccgggagggaagagaaagagcaaaccccggaggtgagcgcagggagaatatctttttgcactaccaccgctgcgcttcgttactttgggaaaactctcacttttgtcagaaatgtgtcggcgcatgaatttccccgacattggctgtgcaaaaaggtctctccctttaaagggtacagccagcttcagcgaggctgagggaaactctaaggttggggcgggtgttgacaaaagagcacgtcccggactcccagactcgcccggctgagagattggagctgaggggcgatgcctctagctgagaaactacccctggcctcgctgcgctcctctgggggctcgggtttggatccctgccaggctggctccaacccttgagggtacgacccttggcgcagagaggagggccaggagcgcacagggttcccggtgctgtttctcttggcgctcacctccccgcccttccttcccgccctatttatggggctgtactcagccagcacctgctggatgtggagatggtaggtgtgagaaatactgcctattttttaaaaatcaacttataatctagccgaaaaacggcatcattttctcattttaaaaaaatgacttttctaagagtattgccagacataaaagggttcctctttctctaaagaaatgacttgtaatcccttagccaaataaataaatcaataaaccgcccacctatcccataaatagatggtgttttctaagacagaacccagaaacagttcacgtcctcacaaaggaattctttttcttaaagcgcgtagcgataaaacggctcttttttttttcgaggaaagtaatgtaccttttaaaagaggttcatcggaaaatgtgactttttaaaagcgagcagccgcaaacgggtgcattttttagactttagaagagcggagcggcagtccgcccgggttgcggctgggactcgcatctgagcgcttagtcgcaaacggactgagggttaggaggagaggtcactttctcagagtgtacagccagagccgcttccttgcctctcccagggaaagacttttagagcttaaccgaaggtgggcccttttgcttcagaatgatttattccgcgttcctctgcttcacccgcctgcggcttagggtgtggggcgctaggctgctcatgtgaagcgcttacgggtgagccctggcctctccgatgcaaaatatgggctgggggctgggaattgctatttgcgccactgcggcctacacccacaaagcaaaaaccgtggggaagaggggctaggacaaaagaaaaagaattaaagctcaacaacaaacaaaataaaaatttttaaagtgtctttttcttgtgtggaaacatcacaaaatgggatttaaacccagcctaggatctgttttgtacgaagaaaagtgtgtggaagaaactggttgaaaatccgggtagaagggggagggggggcagcaaagatggggaggaggcgatggtgtcatagcagtcgcctgtgcgctcttagcgctgcaaccaggaaacaacctgaggagcatgcagagaattccgaacgctgagcacacctgagaacatagacgtgctttgtgacttaaagcgatctaggccccctaaaaagtaaaacaggtgtgactcaaaatagaaaaggaaacggtacttgagggcacccgcgcaacttggtaaagactgacggaattccacttttaatcttgtttgaaacaaactctcgcaatcccagcaggaaattccagcgccagggctggcctttcctctgtgggtctgtgtgtgtgtgtgtgcgcgcgtgtgtgtgtgtgtgtcgcggcggggctgggggtggggaagcaattggaagcaagtcgaagtaatagtgtatgtacacgtttccccctttcttgcctttgtctagttcatcatagagagagcgcggaccgtgtgcgggccgtcttgacgaaagaaccgagagatggatgcgctaaggtctaaagatacctttctccctcgactaaattaagaattgctgcggcagttcccaaaagctgagtcccgctgcagctgccaggtcgccacactcgccaagcggcgagggagcgcctttgcctaccaggc

SEQ ID NO: 44900 - DNA, 2300 bp, Homo sapien
tttatttattttttgcgagataaaaattcttgatagagagcttccagactgctggtggcagggaagcaatctggttaagagattcagaaagcagaaaattctttttctctgcgcaagcagtccacaacagcctttagctaggatttataagattcttggtggagcaaggcgaggcacatcgacaaggagagtttatataagccactggccttgaggtacattgaaaaaatatgtatggcagccacgttttcttagtgggaaagaaaattattcagggaatgaaattttgaaggctaattctctccaagaatcttgcttcacataatttaaaggaggtgtcatccctgtatttgttcactgaggagtccacaaactttaattagtcacctactgtgccagacaatgtgctaggctctaggaatacaaaagagagtatgacaaacatggcatgggcctctttgagccatgacactcttatagatctaggatacgatgtgataaatgatgtaattgaacataatggagagaggaattaatttttgttaagaggttgagaagaggttcataaaggagagagaggtctgtggctttaaaaatagtcattcctagtcagtggctagccaagaaatgtatctggaaggtcatgacctgcacagaataagtaaggaagggcatgagggcttggtgtcttgttacaaagtttagaggtatatgtgtgttttgtagacctagaacatctttgaatatttttttccagcaaattcgttaaagtaacaacaataaaatagcctgagaaaattgggcaatagatagcacacagtagaaatattattgttgtttgcatttaaatgaagaattgaatacattgatgtattacagtagagactggaagcaaatatgttaagaagataatgtaacatccagaaaagaggactaatgaaagaatagggcctaaagctaatcagtataactaagaaagaaaagaaggctactttggggaataaaatttctctttaggcaccatcatgtatccactcagatctttttactcatctcactttccccatccagacttcgaaaaattccccatcttccatctatccagtaaactccctttgtcctggggagacccccactccttcagccactttcaagcacattcatcttcacctcaccccattttctacacacatccctgcatcatctctgaaccttacatcatgtaacattttacccacttcagccttctttctacaaccagttagagcctcttaatcttgtctttttcctccctttaggcactaacaaatagctctatcttgcttctttttcctcctctaagtcaggtattccccgcccctttcccatgcattaattatcctgctaatttgtccattcatttcccccttttacatcctcctcccccttagccaccttgcattctcctatctttcattgacctcaaagaagctaaggggaaagaaaagccactctactttaaacttgcttagatttgccaaattttcatcatcaaggtttcttcctttctgtgtcttttgctgttttagttcacacaagacttttagtggaattccttcaatttgttatatatttttattatgcctgcaaatgtctgttttcctttggttgtggctggggattcaaatattttactttggggagtatttccaacctttctgaagttctcactgacacactcctgacactgtttcgctgcatcccatcctttctgctgtattctcttcccatgggtaattccttttatattttcagtgaaattctttcttatttttattccctcctccccccctcctcctttttttctttttgctttgtgggattggtacagtggctcaagtttaaatattttgagaagggacccccctcagcagaccccctcagcccacacacaggattttaaagcctgtgtcaacgtgtgttcatgtcaacatacagttaccaatcttcagaggcaaaggaacccctgtttgttttattttaactgcactcttagaaaattctttttctgtgtgtatggtaaaggtgcaattctcatatcgttgttctctctacattcagtggaattgattcaacatcgctgggaattgggaagggaagaaagagtatgctgtaaaaatacatttttcatcaaagacatatatacatgctacgtttgggaaaaataaaatacttgggaacatttaattggattgactttatattacaacattccaaattacatgtcattgtctgagcagagttctattatttgaagactt

SEQ ID NO: 44901 - DNA, 2300 bp, Homo sapien
caccaacatggcacatgtatacatatgtaacaaacctgcatgttgtgcacatgtaccctagaacttaaagtataattaaaaaaattaaaaataaagatagagtagaacagatttagaatggattgagggagggtgacttcttggaactagatcactctattaattatttatgttgtgtagagatattgcgacatgcatgcaatgcttttatttctttattttgctttattttgtttttcattttgggcggttatcccaggaattcaaggtggttttatcttttttttttttttaatttaacttttattctgagttcaggggtacaagtgtaggtttatgtaagtaaacctgtgtcatgggggtttgttgtacagattatttcgtcacccaggtattaagcctagtacccattaatttttcctgatcctctccctcctcccatcttccaacctccaataggccccagtgtgtgttgttcccctgtatatgtccatgagttctcatcatttagctcccacttataagtcagaatatcctgcaatgtttttaaaaacagtctgtagtattcttctgccagttgtaataatgtgtaatacctaagggtaagataagaatagagcgataattttaattccaattgtcactgccccatttttatttctgcttatgtttgcatgacatttataaaatcacataagcatccaaaacgtcttagatatgctagattcacagcatatagaacacatatatgtgtgcatattagctggtagtatcaatggggtatttttaatctcaccttcataacagagtataaaaccaaaaattcacaagactgaattttgagcgagtttttatattatgtaatcccaatgcacatcattgtacaaatgatgctaaaaatactataccacaggcaacagtgtttttatgttgtttactaggataaataatgtcttcacctctagcattactcactatcataactaacatattttatatatgataccaactgcttaacataggaaagtcattgaattcataatatatatttttaaaatgttgtgataaaaattaatgagatattttaagtctactgctgacctaaactatcttgattgttgcaacagatgcatttatttgattattgattgtaaatagaaagatttctttttttccaattttgtgtattccaacattggcatatgcatattttaaaaaatgcagatgtgcagctatgcaatgggacagttatttcatataacacattgcttggcataaccagagcacaatatccataacaagttatttatatcatatgtagtcctcctgtttttagaacaattactaaaacttgttgatgttatcgattaccaataaatattgagaaattccttaattggttacctatatgcattaatacatttctggaatggaattttaaataaccacctgaacactgagttttcaaaactgctaaataccttaatagttgcattaaccttcatttaattataaaagtatgacatctgataggctttagctcagtgtgatacaaatttaattttgtttatataatatatcatctacaagtactatccagaagaagcacattagaatgtttaattatactagagattaaaagatatttaatatataaacttgagaataaataaaatagagaataagaattgagaattatgaaaggaaactgaaggtaaaatttgcagattttaagaaaatcaaaatccctcattgaattttgtcagaagagttcaagaactgaaataattttaaagctttcagtgagtgaaaaataatagggagaagtagcaagagagattgatttttgactcactttcaactcggtactgtttttaaatgcctttcttattttcaagcccttctcaagctgttccttgaagttgtataattcctgttagtctatagatgtgaaaacccatttttatatgaactaccttctgcgttctataaacataaattctcagggttgggatgtcttctagtctaactctcccattgaatgtttggacgtcatctaccaaatccgtgtatctaaagcaaatatagtagatctaatctggtggtccagtacctccaaagatatggaatacactcctgaaatatcctgaaaccttttttttttcagaatcctttaataagcagttatgtcaatctgaaagttgcttacttgtactttatattaatagctattcttgtttttcttatccaaagaaaaatcctctaatccccttttcacatgatagttgttaccatgttta

SEQ ID NO: 44902 - DNA, 2300 bp, Homo sapien
cctcaaaatctagccttaatattttaaattgttcatggctatataaagcgaatctagccaatcataataactccttttggtagctacaattaaaagaataattctgagatatacagaactggacatcttacagaaaaatttatatatgatcacattatattttcatttggttttctgcaggccatctgacttcactaattacattgtcaaactatcctaacaacacaaatgtcaatttaaaatccttctcagttagtttggatatttaagataacaaattctttttttaaagaatctttttaaagattttgctgactcccagaaagaactcaagaaatatgaattatggaggactcaacttttctcaaaaataaatgtgggaataaaaattgtttcatggtccattgaaagttcctactaaggcactggttacactgctttgggaggtacatgaagcagttatgataatatacaaattttaatgatgatgagaaattcccaaagcaaaattttgagggctggatccattattttcttcagtttggcaaagaaaatactaagaaatcagtatttctaaaatatgcctttaagctatccaaaatatttgaaacaattttagctctcaaacatttcatatgttttaatactcaatctgttcttgagagggtgaattctaaattaaggccatttttaaatgggacttggtggtgtatctggtctttaggtccacagtgaaattgatttgtaaagcgtgttcctttgcatgattttaatgcagacaaaatacatgcctccaagataataatgtacaatctgtacattgctaaaagacttaagttttaaaatttcttccttgtgaaattgaaaataagtttcttctaagcaatttacccaatttcgaagctttgactgttttgtcaacaaacctttttgagttgtgcgcatagaaataaaacagggataaaactcaatcatatctagagagagaatataattgaagttttttagaataaaaaatttcaaaactttttctttacattttcaccaacctgtttgctccattacaaactaatttaaaaatctgctgtactataaagaaaacagtaggtaaataaagtctctatattgcataagtaaatggacatgatatcaggaaacaacttttacttaaacacttgaaggtaggccatttgtatatattattttgagaaatgtctattacaatctcttgtctatttattaatcactttttttcctattgagttgtttgagctcctcatatattctggttattaattccttgccagatgagtagtttacaaatatttcccccccttctgtgggttgtctcatcactttgttgattgtttcctttgctgtgcagaaactttttaacttgctgtgatcccatttgtccattttttggtttgattgcttgtgcctctggggcattggtcaataagtctttgccaagaccaatgtcctggatagtttctccagtgttttcttgtagtagtttcatagtttaaggtcttagatttaagtgtttaatccacttggatttgatttttgtatatagcaagagatacgggtcaagtttaattcttctacatatggatatccagttttcccagaaccatttaatgaagagactctcttttcctcagtttatattcctggcacctttgtcaaaaatgagttcactgtaggtatgtgaatttgtttgtgggttctctattctgttcccctggtatatgtgtctatttttatgccagtaccatgctgttttggttactatggctctgtagtataatttgaagtcaggtactatgattcccccagtgtagttatttttgcttagcatagctttggttattctgggtcttttgtggttccatataaattttaggattattttttctatttctctgaagaatgtcattggtgttttgataggaattgtagatggctttgggtagtatggactttgtaacaatatagatttttccaatctatgaatatgaaatgtctttcaatttttttgtatctgcctcaatttctttcatcaatgttttatagttttcattgtttaaatcttttttttttaactctgtactttttattggcctcctgctccccaaagggtaccctgcttctgctggcttaatgcctcagaactttggtgtcgttggtctcagacaccactttgccatccactctccggcgggtggtggtcttttggatggtttgcatggagttgctgctgtccaaggcatcaccaagaatgaagtcctcgccat

SEQ ID NO: 44903 - DNA, 2300 bp, Homo sapien
ggaaagaactcttgggtatggcaaatcagggtttaaatatcaattcttccatgtaaaactgtatgactacaaccaagtttcctaatatctttgagcctcagtttacatcttatcacatgaatttacttggctataggaaaatacaatcccaatgtagtgatacttttgtatctagcgcagagtcgtcgacagtagaatggcaccctgtagtctctataaacaactgtaaaatgagcacccagcaatacaaatgtttatgttctgttgtgctgacaaatactggtgaactattcataaatcttatgcatttactgatacttcaggtcaaagagctttcacaactattcagcccctgatgccttattgccttatttcaaaaagaggacatagctgtagatcaatgcattttcttgaatgttttatgtaaattcagtattgttagtgagaaataatggattacagtggtgccggcctaaaaaatccactggcaaaaacaaggctgattaaaaaaaaagaaaatcaaatatcagcctcattcctgaaacaaagtggaaggtcaactgtttgtacatatagcatgacagccccgctgacatacacttcatttttcatagaataaactgacagtgatatttaatactcctaacaggggctagatgttctgatctgttaaactgcttggcagttcatgcagagaagacaaaagtgcactgacatcctattgagaggccaggacaaaatatatctcttgaatcacaaataacatgaaaaggacttaggactgaccatatatgcatgactttcatgttattttaaaataaaatgttctaaacaacttatacctctttactatttcatgtccaataattgcactctgattttgtttaaggaaatttttgaattgcctttgagttcagggtgaggatctcttaactacctttagaatagataatatgcaaaatagcgaaatggttcttttggtatgggtgtttaactcttcagcagatgcttctcattttcctttgcattacatcacatagccttgtgaagggaaagaaaataaccttaaaaaaaaaacctgttggcaagagagggatataaaaattaagggagcagccgggtgtggtggttcacacctgtaatcctagcactttgggaggccgaggtggttggattgcctgagctcaggagttcgagaccagcctgggcaacacggtgaaaccccgtcactactaaaatacaaaaaattagcctggcatggtggtgtgcacctgtaatcccagctactcaggaggctgagacaggagaattgcttgaacctgagaggaggaagttgcagtgagccgagatcatgccattgcactccagcctgggtgacagagtgagactccatctcaaaaaaaaaaaaaaaagttaagggggcaaacattatgtaagttttactactgaagttctctcgtttctgcgttcttcagagtctaagtcttgaatgaaagcttctcataactttattcctaaaaatgggttttgacctagaaatgaacacattactaccttattgacttctaaggagaccaaaaaaaaaaaagatgtatgaactgccctgttcattacattagaattccaatgctataacttactgataacaacttttaagaaaattgtactttattgtagtcagagaactcaacatgagatctaccttcttaaattttatgtgtccaatatggtattgttgactatagacacaatgtacagcagatctctagggcttattcatcttgctttgaagttcttactaaaatgaaactttacaatttaaaaaaaaaaattaccattgcagtaaaagtaaattatctcactgaactttactgtagtctcatacagtgtgatctgtatttatgaccttttagtatatgcaatgtgcatccatatagctgtgttttaaatagatacttacaaaatatatgtttgttttacataattcagagtttgaaaaaagaaaacattataattatattatttgctcacatttagaaaaatcatacaatattcaacattaaataacgggctctcgctaggaggaggagccaagatggccgaataggaacagctccggtctacagctcccagcgtgagcgacgcagaagacgggtgatttctgcatttccatctgaggtaccgggttcatctcactagggagtgccagacagtgggcgcaggccagtgtgtgtgcgcaccgtgcgcgagccgaagcagggcgaggcattgcctcacctgggaagcgcaaggggtcaggg

SEQ ID NO: 44904 - DNA, 2300 bp, Homo sapien
atacaggctccgagtaccatgcttcctccctgaggatgctgtactccaaggagcattccaaagggcctctagtcctgtgccctgggcacaccagaggccagccgccagggttggccattgtcggcctgcgcgcacgctgttgtgcactgccttgacgacccagaggctcccgcacccgcagcagccgctgcggtgcctgctggtggggctctggaagcacagggcctcggcctctggcttctgagctcctatgcgcagttgaccctgctgtggtcctgagccccacggcgagtgcggccatctgcgggcccagcggggctcctcaggaaacctgggtccatgtaggtgtgggactaggttttcagcagggagaggcccgtgggtctttcacggagcgggcctcttggggagcagcccccagagcatagggataccggggatgtgctgggctgtgcaggccagggtctgtgggagcacccaggagggcaccgtgttcaggctggaggctctgctggagaggacggccggggtacagagcaaggaggcagccttggaagaggaggcggtgctgaaggtggaagacataatggctgaggtggaggtggtggttgaggaggagactgacgtggggtggcagaaggagggccagcgggcacagcttggccctggacccagcacacccaggccatcaatggactcgctggaggtccttcacttggaggtagactccgtgaatgcccctgtggcctgggcttctgggacagagccatatccttgcagctgccgattccagatggctggcagcaggggatgggcatcgggcttcgtgggggcatgggggctgttgggggaggagccaggaggaggcacatggggtgagccaggaggcaggggatgggggacaggatgggagccgaggtcacgttcctgcagctgtgagggcagcttgcttgtagcagcactgggagcactgggagcacgtggtagggaaggggagccgagcacagcactcacaagggagaatcgcggcgccagagtcccttcacgcacagcacaatgtcaaagggcatgtttccctgggaatgtcctggaggaaggggagtctgcatgacattgccagccattgaatcacccccgctctcagtgcccgtttccagaaggctcgccccagaaacacaaggtgcttaagactcgggttagcggtacatggggctgccgacctccacaaggcaggtactagctccccagatatgctttcttctgcctgccggcgctgcacccaaagggttatagcccctgagcgtatataacctcctttgcacccacccagtccccatggggagcgccaggaactaccctgcagccccttctaactacagggcttcctcaggcagacaggtccacccctcagggagactaggataagaagacaccacacacccggacatcagcagagcatgtccagcacccagcaagcaaaggcctcctgcagctcatgaacccagagaagcagccgcctcacaccaccctgcccccgcccctgcccctcagctgcaaccacctgcccactttttctgcctcccgtctctggtcagcccaggccgtcttggccggggtccagccaccccaaaaaccaccacagttgtggcattgcctcctcaccagacagaaacagaggatcaacatcggagcgtgacaggccaaatgtctgggagatatccctgctccacattctctgtgctcttgcagaattgcaggcgtcaggaggcttgcccactgaatcatctggagactccttgaccagatgtagattgtttggcacaccagatgttgacctgggttggaaaccatgatgaagtgatggatttgcaggtcaggctggggagcctgggtctgtgggaggggtccagtgtctgagtcagtttgaggtccccctggggtccagggttgtctcagttgcaaagctgggaatgggaaattcatgcttcactccagctagcaggccacctcagcccagctagatgaaatggtcccattgaatccatactctttctccttcttggttaggcaggtggaggaactcaggcatccctgttaccggcagcaagatgaagatttccttttgtcacagcctttatttccacaatgaagtgatcagtaagtagtactgcattggcatcctcggtaaggagtgcctcctagcatggtaggggagccggtatgtgggagggtaggtctaggatgaaccttcctgactcctctccctccagggtacagggtatctcattccactgcagtcc

SEQ ID NO: 44905 - DNA, 2300 bp, Homo sapien
gagacgggaggcagaaaaagtgggcaggtggttgcagctgaggggcaggggcgggggcagggtggtgtgaggcggctgcttctctgggttcatgagctgcaggaggcctttgcttgctgggtgctggacatgctctgctgatgtccgggtgtgtggtgtcttcttatcctagtctccctgaggggtggacctgtctgcctgaggaagccctgtagttagaaggggctgcagggtagttcctggcgctccccatggggactgggtgggtgcaaaggaggttatatacgctcaggggctataaccctttgggtgcagcgccggcaggcagaagaaagcatatctggggagctagtacctgccttgtggaggtcggcagccccatgtaccgctaacccgagtcttaagcaccttgtgtttctggggcgagccttctggaaacgggcactgagagcgggggtgattcaatggctggcaatgtcatgcagactccccttcctccaggacattcccagggaaacatgccctttgacattgtgctgtgcgtgaagggactctggcgccgcgattctcccttgtgagtgctgtgctcggctccccttccctaccacgtgctcccagtgctcccagtgctgctacaagcaagctgccctcacagctgcaggaacgtgacctcggctcccatcctgtcccccatcccctgcctcctggctcaccccatgtgcctcctcctggctcctcccccaacagcccccatgcccccacgaagcccgatgcccatcccctgctgccagccatctggaatcggcagctgcaaggatatggctctgtcccagaagcccaggccacaggggcattcacggagtctacctccaagtgaaggacctccagcgagtccattgatggcctgggtgtgctgggtccagggccaagctgtgcccgctggccctccttctgccaccccacgtcagtctcctcctcaaccaccacctccacctcagccattatgtcttccaccttcagcaccgcctcctcttccaaggctgcctccttgctctgtaccccggccgtcctctccagcagagcctccagcctgaacacggtgccctcctgggtgctcccacagaccctggcctgcacagcccagcacatccccggtatccctatgctctgggggctgctccccaagaggcccgctccgtgaaagacccacgggcctctccctgctgaaaacctagtcccacacctacatggacccaggtttcctgaggagccccgctgggcccgcagatggccgcactcgccgtggggctcaggaccacagcagggtcaactgcgcataggagctcagaagccagaggccgaggccctgtgcttccagagccccaccagcaggcaccgcagcggctgctgcgggtgcgggagcctctgggtcgtcaaggcagtgcacaacagcgtgcgcgcaggccgacaatggccaaccctggcggctggcctctggtgtgcccagggcacaggactagaggccctttggaatgctccttggagtacagcatcctcagggaggaagcatggtactcggagcctgtatttgcctcgacctgcgagagtacatgccagggttctagcctacagtgcagacgaattccacctctgcacaagcaggtgactttcctcccacatacccgccccgactcacttctgctaggccacccccgccgccctcgccccagcaaccagagaaagttctcctctggatctgcaatattccttatgtaccatctacctggcctgcctaatgaagagagatgtttcctgtgttcatgacacatagagatgttcatggcttgccacactgaggatgtcagggcacagggctgccatgcccacaattccaaaggccacgcagcccgcgtgtgcccggacgcctagctacccggcacaagttccaagggcttctcggaggaggcttgggcagggaaggcggggggtgggggggctggagatgcaggcccgccagtggctgtgccgcccagggagacgcccaccgcccttccattgattggccacgacgggaggaagtcggcctgggtgcggccccccggctcttcgcgcgcagtcccttagggggcgcctggaagcccggcgcatgcgccctgagggctcgctgacctaccgggtgccagagaggctgcggcagggttcctgtggcgtgggtcgggcagcacaggccttggtgtgtgcgagtgccaaggagggcaccgccttcaggatggaggctgtgcaggagggggcggccgggg

SEQ ID NO: 44906 - DNA, 2300 bp, Homo sapien
acttagaaagctcgtgaagtacactatgtgcttctccaagatgtcatccctaggtttagactgcccttatgaatgagctcagacaacatgccatcatttgttgctgacttggtacaaaaggcagcaaaggtattggaaatgacatggaaactacatactgcttattgaccgtagagttgcggaaaggtgaagcagatgaactggactatcaaaaatagtttagaaaaagtgtgtcaagaaagaggattaaagccggcacaagctctccctaaggtattgtttaagattaaatgtattccttctaaaagaacaggatattcaccttatgaaatattatatcataggccccctcccatactacggggactcctaggcactcattgagagctaggtaaaattgagttacagcaacaattacaggctctagggaaaattacagaaacaatttcagccagggtaaatgactttcttcccagatgatcgggtgtggatcccggatcggaaagtagcccccttgtggccacaggtggaaaggacaccaggccttcgtcttgaccactcccacagccacaaatgtagagaaaattctagcgtggatccatcatagccacctaaaactgcagcacctgagacctgggaggagagaccaagcccagataacacctccaaggtgactttgaagaagatgacaagccctactccagtcatacccaggagctgactggtccacgcatggccaaaacatgaggaaactcattgtaggactcacttttcttaaattttggatgtgtacagtaaggacttcaactgaccttcctcagactgaggactgttcaagttactgaggtagggaaaaaagttaaagcagtctttttgttttatagttattatgaatgtattgcaactttaaaagggatgactttgtataacgccaccctgcacaaggtatgcagcccaggaagtaaccagcctgatgtgggaaaacccattataactacttgatccctgtcggaaaacaggagagtatgtaattctaagaatcaatggaaatggactggatccccaagtaaatattttagtctaagggaaggtccacaggcactctcccaagccagtgtttactccctgtatggtacctgtacttttaccaccttagttcatcaaaagaccacagcacaagtgcattacataaatcactatcaatctgttttgcagaaagacctgggtaatgaagatgagaaagagaactctcactagtgagtgcagctctcaaagagggggatgaggaggaaggctatttctcttactgtcccctgttctctgaatagaaggaggaagtaaaagctgaaaaacatcaggaatgaaatcattgacaagaccagctggtgccactaatgaacaggcctgaggttaaaagtttaacccaccactctaaccacacgtgctatctctagatctcaatctattacaaccctttcacgtgtaaccccttaaagttgtaagcacttaaaagggacaggaactgtttcttccaggagctcagttcctgagacaggagtctgccaacactcccagctgaataaagccactttcttctttaatccagtgtctgaggggttttgttcatggcttgtcctgctacaaaggaatgcagcaatggggttgactggttctgcaagaagcccccacctgggagacagcaaccccagggaaaacagcctggctctacctagaaatcacagtggggtaagtttcaaaaaggctcacccctacaatgtctaggttgaatgaggaatcctgaagatcattttttattattagggatttcatggtttattgctggaactttacttgaggtttcttcaggctggctcacatctgccctctcctaggatcatggaacaataccatggatcccacagtgaagacaggtgagagtccacctttgacacaactccacggaggtcttcttctccaccaagccacaggaacttgttgctaggcaatggttacactcattgtgatgctagccagagctcacaatcaggcctggtgccctgagagtagtgcatgcccattcctgtggcagcctatgtttcctgtctgtcagagctgtcagcctgcttaagcagagtaaaatggtacaggcagtgcagcctggtagcgagaaaaaaggctgcctgtgaaatcccactgtgggaccataagtggggacctcagggccccttcatggcatctccatggccatgtcatgctggagaaggaggcgtttcaagaatgtgagctgatcgctggaaact

SEQ ID NO: 44907 - DNA, 2300 bp, Homo sapien
gccttaggttgagagttttaggatcctgcagtgggttttcacaggcagcatttttcccaataccagtctggctctgcctgtattattttcctctgcttgggcagactgacaggtctgatggccaggcacctgggcctgcctcacgaatgtgcatgcacaagtctcagggcaccaggactgatattgagctttagtgagcatcccaatgaatgtcattgttgcctagcaacaagtcccttcatctttgcagagaaaaaggcctacgtggagctgcgtggttggtgaactcttgcctgtcttctctgtggaaaccacaggatagtcccatgagcctaggagagggcaaatgagagccagcctgaagaaacatcgaccacagcactaggaataaacctcaaaatccctaaggatccaaaaaaatcggaaggattccttaggcctgcctagactttgtaggtgtgagtctttttgaaacttgcagtactgtgatttctaggagcaggccacctgtattgcctggggttgctctatgccacattagcttcttgcaaaaccacacagccacaggagctgacaaactgtttctgaaagagtgttgtgagagttggatgttggcatgggtgtgtggctttgttttttttgtgtgtgtgtttgtgtgtgcctgtaagtggagtctgcttaaggaatgtggctaccacactttggtgcttctttttttaattgagtctcacaaatttggtggcctgtctgtgtggctctgcttgggccgcagggctccatgttctttattttcctgtggctcatgaatccacagtgaattgggggccgggctgagacctaccagcatccaagtcacctaccacagcaaaaaaagccactcttctagaatgaagaggagcacaccacaccaaaacaaaacaaaacaaaaaaaaaaaaaaagaaaaaaaaaaacaggcatctgccagtgtttcattgtcctgtggccaaccaagaaagagacactgtcagtcctgtcctcatggccccttgaatttaccaagaattcagttcactgccaagcaggttcttctggtcatgagacggcactcctccatcgtctgggcatttatcctgggacatacagggtgagcaggaatagggtcaggtaggagtgaggatacaatctggtgaaggttggatgaagccccacaacttcacctgcaaaaaaaacatgaagacagatgacacagaaggtgcttccaactcaacccccacattcccttaattacacaagtagtccacaccataatgtgggttcaagttggagcactgcaatgtgaaaggaacatttggagtgcaaatccggcccatcctgtcaaacttctgatttgaaggctttcaaacccggagccaaatgggagtggaatgaattgatgttgggtgggatgtggcctccaaacttgcctcttcttttcctcacttgcatgttcctcattggcctggggtttcctgggtttggctgaacaactgttacactaaacatttctgagttcatggagaacatccctcatgggaatccactgagtgagtgttttcttctaaacactgtcacgttttaataactgggcagctttgatgcttttaaaactaaattcccattacagccaccaacaatgaaactcttcttttccctctgctctcagagggctgcatgattcttgtattatgagaagcatgtagctgtgtctagattttgcctggtaatctagcctctgcttcatttcatctgctcctccttctcattgtgaatgggttctttcattgggctgttaatggatgggtatgcctcttgccacagatattttggctgccagggatttcaggaagcaaaatggttatagagtagactggctgcacatcgggttttaggtcattgtcttgttgtggggtctgaggttgtttgcattttgaaagaggctttttatttctgtgacaggaatattggtacattgcttggactctagcacaagtcagctcgttctttcagatgatgcttgatgtttcttggctttcatgggggattcacattgccactcaaccacactactggatacacttttcaggcttgccatcaccacagatggcctctgagacactgtttgaaccacatctgcacctgtgagaggccagtttgaggtatgagaacactgtttcaatttggacttgcctttgtcttggttcctgcttttcccagatagcacctacccaacccaggatgaatgagtgcagagaggtcaagtgccaggccatcttttgctgac

SEQ ID NO: 44908 - DNA, 2300 bp, Homo sapien
tcatatcttggactgggctttcacccatgaaggtgaagttgagacagggtctcagcggccatctgtggggatggtaagcctgaaagtggtgtcctgttgtgctgttgaggggcactgtgaactcccctggaaagcaaagacaaatcaaggcatacctgggagaatgagctgccttgttccgcggtccagatgatgttcatgattcctgtcagaggacccaaaatcctcttgcaatttggaaaccacatcagtttcaacaatgagacaaggacccacctccttgagcataggcagactacttgaagtcccatttgctgtttgaaatcactggcagctaatctgtggccagaggcagtctcatctagcaatagcctaatgaaagagcccttccatgatgagaagcccgtccagatgaaatgaaacagaggatagattaccaggcaaaagcaagacatggctaagtgctcatcctacaggaattatgcagccctccaatagaagtgggagtttccttggtggtggtggtggtaatgggaatttatgattttaaaagtatcaaagctgcccagtcattaaaacttgacagtgtttagaaggaaacacttatgcaatggattcccatgataatcattctccatgaactgagaaacgtttagtgtagaagtggttgagccatacccaggaaaccctaggccaacaagaaacatggaagtcagtgaaagaagaagcaagtctggaggccacatcccacccagcatccatcaattccactcccatttggctttgagtatgaaagccctcaaatcgggagtttgccaggttggccccaatttgcagtccaaatattttttgcacattggagtactctcacttgaacaccgagccatgttgttgtctgcttgtgcaattaagggaatgcggggatggagttggaaacacattctgtgtcacctgtcttcactatttttacaggtgtagttgtgggaccccatccaccctgaccagattgtatcctcatccctatttgaccttattgctgctcactctctatgtcccagtataaaatcccaagactgtggtggagtgccccctcatgacataaagcacctcctcaggtgggaaacaaatttgaggtaaattcaagtggccctgcagacaggacacttaatgtctctccctcgtttggccaaaggacagacaatgaaacactgggcaatatctcatttttggtgtgacgtgctcctcttctttttagaagattggctttttttggtacggagagatgacttggacacagacatctctcgacctgcctcccaattgactgcggatttatgatcttccaaaaaataaagaacacagggacccataacccaagcagagccacacagccaagccaacaaagtgttggaagaaaaaaaaaaagaagaagctcagaagtgtgtcagccacattattttaagcagagccacttacaggcacacacacacacacacacacacacacacacacaaacacgatgccaaaaacacacacagacatccaacactcacaacactcccacagaaaaatacagcctggcagcacctgagactgtgtggttctgcaggaatcccgacctaggagagagcaaccccaacgaacacagggcaactgtacctagaaatcattgtgggacaagtttcaaaaagactcacccctaaaacttcttggcaggcccatgaaatcttgcagacatttttggattcttagggttttcaatgtttattcctgggatcagctttacctttcttcatgctggttcacatctaccctatcctagggtaatgagactatccagtaaatctcacagagaagacaggtgacagtccactgcccacacaactacatagaggtcttcttctctggcaagccacgggcattgtaactaggcaatggtgacatttattgtgatgctagctagagctcacaatcaggcctggtatcctgagagtagcccatgcacattttaaggcaggctcaggtaaccaactctcagggctgtcatcctgactaagcagaggaaaatggtacaggcagaactgaactagggtgggataaaaggctgcctgagataacccactgccttacccaaaaggtctagactctagagcccttttgggcagtctccatggtcaggtccaactgaaagaggagtcattttgagactgtgaggtggtcgctgcaatctgctcctctgtctccattccaaaaagagactgtgtgtaagagtctgctctcttggggattggaataccatc

SEQ ID NO: 44909 - DNA, 2300 bp, Homo sapien
aagactcatccctacaatgtctaggcaggccagaggaatcctgctgatctttttggatccttagggatttcatggtttattcctggagctgtgcttcaggtttcttcaggctgcctcatgtctgccctctcctaggatcatgggactatcctgtggatctcacagagaagacaggcgatagttcactgctgacgcacctctacagaagtctcattcaccaagctgaagagacttgttgctaggtaatggtgacatttatgctgatgcaagccagagttcacaatgaggcctggtgccctgaggatagtgcatgcacattcgtgaggcaagctggggagcatggctgtcagagctatcagcctgcctaagtagacaataatggtacagacagagttgtcctggtatcaggaaaaaggctgtctgcaaaaacccactgaagcacactaaaactcccgacctcagggacccttcaggccatcgtggtggttaggttctgctggaggaggaggcattttgtgactgtgaggtggtcgctagaaactactcttcagattccattcccaaaaaaggctgtgtgcaagtattgggtaccatggggattaaaatatagtctgatgtgttcttgagggtgttttgtgtgataggatcatacctgagaccccagaagtgggtgtcatgaaaagatggtcggactcttaacctcactgcctcccttcatctatgaccttgcaggggctctcaaggaaagacagaaactacaacaaaggcaagtcaaagttggatcactgttctcacacctcatactgccctctcttgggtgaagacgaggttaaaacagtgtctcagaggccatttgttgggatagcaagcctgaaatgggtgtccagtagtgctgttaagggataatgtagattcctcatgaaaacaaagaaaaatcaagtctcacctaagagaacgagctgccttgtgctggagtccaagtagtgttcagtgattcctgtcagagaacacaaaagcctcttgccacgtgcaaatattctcagcccccacaacaagacaatgatagggagtgtagtcagagtacccaatgtcccttttgctctctgaaatccctggcagctaaataatccctagccagaagcagtctcatctagcaacaacccaatgaaagagaccctccacaagaagaatgccatgcagatgaaatgaaacagaggctagattacaaggaaaaagacaaacacggctgcctgcttttcatcctgcaggaattatgcagcacctcgatagaaatgggagaacaagagttttcttattggtggctgtaatgggaatttacagttttaacaatctcagagcttcatagtcattaaaacgtgacagtggttagaagaaaacactcaagcaatggattctcgtgagggtcgttctccatgaacaggaaaatatttgttgtggaagttgttgagccagacccagaacacaggcaagagttcaatgctaacgcacctccacgaaagtctccgtctctgccaagcctcagggacttctcagtatgcaacagtcacagtcattgtgatgctagcaaggtctcacaatcagtcctggtgccctgagtctagcgcatgcacatttgtgaaacaggctccggtgcccatttgtcagagctatcagtctgcctaagcagagaaaaatagtacaggcagagcgagcttggtatcagaaaaagtcgtgactgcaaaaacccactgcaggaccctaaaagtcttgatatcagggccccttcgggatgtctccatggtcagtttttgttagagaagaaggcattttgagactgtgaagtggtcactggaaacagcttttctgactgcattcccaaaagagaatatgtgtacaagaatcaggtcacatggggattgcaatatagtctggtgtgtggttgaggattatttgagtgatagaatcttacctgagaccaaccccagaggtgtgtatcagcaaaagatggccgagttcttgacctcactgcctcccttcatcttgggactaacaggggatctctgggaaaggcagttaccatgacaaggcaagtacaaggaggagcagtgtcctcacgcattggactggcctccaatgggtgcagatgaggctaagacaatgtctccgaggccatctgtggttatggcaagcctgaaaaaggtgaatattagtgctgtcaatattcactgtgaaatacccatgaaagcaaagaaaaatcaagacatttcttaacagaatgagctgccttgtgctggagtcca

SEQ ID NO: 44910 - DNA, 2300 bp, Homo sapien
ttgaattaacactagtagcctacagatggataaactaaattagcaccgtgtaacacatgcccgctagggattcaagaagtgtaagcattcacccatagatggtacctggggtcagaaccccagatcccatccttattgatctcccagctgcaggtaataagggatgttttcccattccaatatgaatctgtttccaatgcagtgtattctgcaatactgcggtgttaccttattgcatatgtttgacaaaataatttacaaactataactaatctgagaagaaaacaaatggtggagaataaggaagaaaaatgaaacattatgtttcacaatgaatgttaacaattataggtatgattaatcaatacatgagaccagccaagcaggtgctttatgtcatgagggagcactactccatcatcttgggctttcattctgggacagagagtgtgagcagctataaggtcagatagagaagaggacacaatctggtgaggtgtggattgtgtcccgcaagtgcacctgcaaaaaaggtgaagacagatgacacagaagttccttgcaactgcattaccacatcctcttaattgcacaagccatgcacaccagggcccggtgttcaagtgggagttctccaacatgccatgaacatgtagagtacaaactggggctgtgcacttagagggctttcaaacaccgggccaaatgggagtgggatggattgatgctgggtgggatgtggcctccacagttgctctttttttttctgacttcgatcttcctcattgaattagggtttccttggtctggctcattgtcttccatactaaacatctcccagttcacaaaggatgaccctcataggaatccattgtgtgattgttttcttctaaacactgtcacattttaatgacttggcagctttaatatttttaaaactgtaaattcctttagagctgccaacagggaaactcttgttttcccacttctatcggagggtggcttgattcatatggaatgagaagcaggcaactgtgtctaatatttgcctggtaatcttggctctgtttcgtttcatctgcacgtcttttcatattgtcacgggtctctttcaatgggctgttgctggatgggactccctctcactgcaggtcttttgactgcaaggaatttcagacagcaaagaagacttcagagagactggctgagctccaggttgtgggtcatggttgcattgttgggggtgaagatttttgcagtttgcaggaggattttgagtcctctgacaagaatcattgaacattgctttgactccagcattttgcagcttgttctctcaggtaagcattgatttttcttggctttcctagggattccacattgcccatcaactgaactactggacaccattttcaggtttgcaattgccacagatggcctctgagacactgtcacaacttcatctgcctataggcaaggccagttcgaggtgagagaacactgctccaccttgaaattgcctttgtagtggttcttgcctttcccagagagcccctgcaaggcccaggatgaagggaggcagtgaggtcaagagcccagccatcttttgcagacacctgcctctggggtctcaggtgtgattccatcacataaagaaccctcaacaactcactggcccctgtcccaatccccatgggacctggttcttgcacatggtctctttcaggaatggagtcagaacaacagtttccagtgaccacctcatagcttctaaatacctcctcttccaccagaactccaccaccaagacgacccgatggggcaataagtttgagacttttagggtcatgcaggcaacctttttctcaataccaggacggctctgcctgtaccattttcctctgcttaggcagctgatggctctgacaggcaggcacctgatcctgtctcatgaatgtgcatgagctagtcttaaagcaccaggcctgagcagtgagctctggctagtgtcacaataaatggaaccattgcctagcgacaagtccctgcacctttgtggagaatgagacctctgtggaggtgtgtcagtggtggactcttgcctgtcttttctgtgggatacacaggacagtgccatgattctagtagatggtagatgtgagccagcccgaaggaacatcaaggagagttccaggaatgaaccgtgaaatccctaaggatccaaaaggatatgcaggttgcctccagcctggttacatgtttcaggggttactctttttaaaacttgtctcaaaatgatt

SEQ ID NO: 44911 - DNA, 2300 bp, Homo sapien
tgaattaggatattcagttgggaaaaacaaatagaatcatactgtttttgtgatactggtcatcaaactctggataattctcgacagtgaatcagaaacaagaattctgttgtttacattgaacaaatatataatttcttatcattcaaaaatatgagacaacataaaaaaatacattgttaaagccaaagacctctactttttgttttcaatcatttctttagtagagctcacccataattttgtagaaaaatttcttaatccttttaggaacttcaataaacataaataaaatgaaataaaaataaaataaaataaaataaattgaaggagaatatgtattatacttcccttctctctccttttactccctcactctctcacctcttctctacaaatacgctaaagcctgttttcttaaaacttagtgttacaatttccttcaaagcgtattcttgccttcaatatacaattcaccaataaatatattcataaatacaaatacaccctgggtactgctggcatttagaactatattctatcttgggtacagctggcatttagaactatattctacgttcactttaactcatctgtgttgccctttataatcttctacatctttctgtatagcaagaagtagaaggtgataggtttacctttcttccttttagcttgaaagatttacctttcttcataaaaattattcatttcttgctaatatccccacatcatcctagaatcttattttcatctttaaaaaatttctaagtgccatgtggtgaattaggacaggtaataactttccatttactaaggatgtctctctctaattttcatgctaattctattaaaagggttttattactgttcccagtttatatatgaagaaactgtggctcagacaggctaaataacttgaaggttgtcccttggtgaaacttgggtaaggtgaacccacatgcatttatatcatagcattaactattatacacatgattttcatacatattttgtccttgaatttaattcttcaaatttggctcatgtatatggtataatattcatatgcaaaaagtttataaatattagctaagtattcaaagagattcagctataatattagttgtatctgggtattactatttcctttattaatttaatattgatagacatcattcattatctctcgatgctagatttttaattgatcagatataaaataaaatcataaatgtttgtggttcactaagatgaaagtgttataaaaaagcatgcgtttaatagatcacagtcctcagagacggacagacttttcttgtttttgcttaggcaaagtagagcttattaaaaatatgaaaacaatgcaactaaagagacactaaagaaaaagaaaatctgtttcatgcatgaaagaaagcagaaatgggctagaagtacacgggcaaagaaggccatcatacttagaaaggttgatacgctatgtaggatgaagtagccagggcaatatgccttatgataggtgttcctaagtatttaaatatattttgatgtgtgctgaccaatgtgtaaaatccctcttgtcttgccttttagatcatgcataaaagttttgctactatgataaccttgaatttgtttagataataaatagttgcagatcacaccagagagacttttggcgcttttctgaacaccagagtggtgacaaatgagtagcaacagggaacaaaggacatacctttaaggaaagcaaaaaatacagttgtagtgattttaaaattttaatcgatcacaggcaatgacataagatcctcttaaacataagtctgaatgttttggcatgtgcaagctacaaatttgctgacttaaaaacagtgcaatgaagttccttttgcctgttaaacatattattgactataatgaagaactatatggactaatcacaatatactaccttatatttagccatggttgcaaaaaaattatgatgatacaggaatttttagtcatattcaacacattttttcttcacaaatctgattggttgttgtagataccttgaaggatataaattgagctcatagttaaagaaaatctagaggaccaagcctccctgtgtagcacaaagaaagtttctctgaatatatttaaaggtatgtggattttacatattattttgtgtcctttttattctgcttcttttctgtaattcatatttaatagatgcaaataaattccatgtttctaatactttatgctgttaagaatcagttacttctgttggattataattaaat

SEQ ID NO: 44912 - DNA, 2300 bp, Homo sapien
aatttccaggtactgttggtgacatttgttgcaaacagatttgtttttcccctgcctccaattagtaagtgaaaataactggaacacacacacacacacacagaaaataacgggaacacacatctctagtgcagtgggtatctgtggaaattattgtggctcgctttgtcagaatgcactagctccttccaactttattttcttgttttctcccacctggtaggactgcacatttgaaaaattcgaagcattaaataacacagtctatcacttatctaccgcccacctaacatttcagaaagaggaattttggtgattgcatgataaatagaggagttctgtcttcctgccttagtgttacagtgtcctttggtgttctataagcctatgataaaagctattgactataagggcagtaaacccggtgggatacaggcaggatggattctgagctgttttgcagttagctacagaagatcagctgcaaaacttggctaccctgtgctcccgttttagagtgaggatttccatcactttctcctactttaaaagattgacatctgccaagtaattagaacatacaaagaggtcttttaaccaagttcagtttggaatttccaagcgctaagcaggggtggcaggctaggaggacggtttggctgtgcagctacttgagagggtgcggtagccgagggctgcgtccttgttaagtccagagctgtaaagacttctactctttactttccaaaactgaacgagcaaggctatagaagaatcaattaaccgcaaagtgaccctacaggcggaaaaaatacagcgcttccaccagaaggcggtgggggaagggaagcacgtgtagccagggtagggttgcatcatgagctcgcttgggttttctcttgcacccttcgtttttcgattgcatgcaatacctcagcatcagtttacacaagcccagggagtccgggagcaatgaagggcaggctcagtggaaggtcccaagtctgtctggagacctttgaatggcagctgataagacataataagacacaatctgttctgctgattcacaattatggagactgtgtatgtgtatttttttatcgatgtgctctaatgatggtgtagcaaccgtgatttcatatcattgatgtttttacagcaatatttcgcagggtaattttcaggtctgcttttttgttggaggatcgaccccttaaaaattcatctcgggttcccgtccccccacaacctgagcttttttgttggaggatcgaccccttaaaaattcatctcgggttcccgtccccccacaacctgagcgtctaacgcgggaggaggagcaagtgaggttataaattgctgagtgtactgggatcttagcacaaagctcatcatatactaaaaggaggggcaaacttatttaaaaatattcaacacggcaggcctcagaggtgctggggagggggagtggaaatctgtttaactgaattaaggccgcgcgcgaagggaggaaggagcgctggggacttgagtacaccagggcccgtccgtgtaagcactggcaacgcaaagcaccttacaaacgcccgaggtctgaagcctgggagtggcggtggaggtgagtctcccagcctcctcttcagttcctacaccccagctcctggcttttacgccagtttgtccctaagaatttctggctctttttctgggaggtgttttgcaaaggggggagcctctgcctgtcccctttttcgagatgggaaatgacaactggggtgtcttctaagacgattttgacggagatacaccctcggacaggtgacgggagttccgtgggggcagagggcggcttcctttttcggttgggggaaggcaacagtctagcagtggcccaggttcccctcgcccaccctcggcataggggaggggccggttcgcagttccccaccctccttaggggaagggctggttccggatctaaaccactggggcgctggagctggggctggtgggaggcgggtttccctcagctggctgttggggaggggcgggccgcggcgagtgggtgccctctcgctctcagtcctcccggtccgcgtttgcatgctagcggccgctcccagtggtggtcaccgccagtgccaatcccttgcgccgccgtgcagtcccgccctctgtcgctgcagccgccgcgcccgctccagtgcccccaattcgcgctcgggagtgaggagccgccaacaccccagctccgctgctgccgccaccgcagtgctctctagtcgccattggttacc

SEQ ID NO: 44913 - DNA, 2300 bp, Homo sapien
gctcggccagattgtacaattttgattcctctcatatttaacaacacctgtacctatcatggtattaaatttatagctcattctggtttagggtcagggacttatttctttggaatggcagagttcagcatttcctgacccccctgcaaaataatgccacttcattaaggcgataatgactcttccatgtctaactcataggcactttccttttttgtctctcaagtaataggctgtggtttctcaaggatttttatgctgtggtttctgaaggatttttgtgatcctttcaaagcagcttttgtcaagcaaggtgttgtgaaatgtgcagggtctgtttataagaagaggtaggtatgtggtcaagttcagggtgggttcggtggaatcagaccaaccagcagcccaagcagagtgttaacgctgcaaatctgtgccacgttcttcttcctgcgtgcaatttgcaggcaaagacatatgcttaattgggtgtgaaacccgggccttgattaaaaggactttatgaggccgcagccttacatttccaaggtcaggccctagtggagagggcgcgcgttccgcggggagacacgaacttttcctgagtgcgcgttccttgctggtcctgaacccctcggccaggcagggcttggcagggccgtttcctgtcctaaccaggatcaagggattgcgcggcttgctggtgaagcttggcagggccgtgacctgtcctaaccaggctcaggggatggcgggggcctgctggtgtcgcatatgttttgcattccagctcaggattttgcagcgcatagagagcgggcgtcaccactagggggatatgctacccacaaaatgcaggtggaggctgggcgaggctagcagccaggggccagaaatccaaagcctgagccaggttcagacttcctgactcccactcccggttagctgtgcaaggatggctcggcctggtccccctaaaaatgtgtccgttctaacttagaggccgctttggctctcagaaagcccccctgacctgaggactgagggactggagaccgctttcagtcgcagaatcgctgagatccctcaaaacaaaggcgtttccagtttgaccccttgctgctcaatgtgtggttggccaaccgacagcctggggcgccctggttgcgggtcaggggagcagcgtctaggccgtgccaggcccgcaagttaagcactgtctgcatttccctggggaaaggggtgaccaaatatctagctatatttgcatttcaaatccacacggataagagttttaaatataagtatgtccaactattgcctaagccacacttacgctaggaaaaaaaaaatctttgcgtttctgaaattgaaatgtgtctgcacagttctttatcaggttgtcgccggggtgtttaaacagtgaccaatcaagtttcacacgctacatttggtcgggcgacctctcaaatctgtctttccctagttctttaaataaatgtttatttggaaagaattctagatccacaggaagctgcaaacaaacgcacagagtcaagcccaccctttctccccctttccaagtaaaaatgtggaatcaccagtcctacgacgaaaccagggcgctgaccttgttccccagacccggcagcccctcttggggatccgcgcgcagcgcgcgtcctgagtagccaggctaattccagcccctctcctcaccaaacgccaatttcactttctatttttgagcttcacttttgctgagccacgccctccctgtccccgggccacccagcctccccatcttccgggtttgggtgcagcaacgcgggtggcccgccagtgcgactccggggagaagtcatcctgggtcccaccccgggggcgccccgggcgcggagggggcgtgggcacctccccagcgccgcccctgcccttggtgactggagtcgcctgcacgcccgggtctccgactcctcggctgggtcgccgcccgggcggagcccacgcgaaggcgacgccccccaaagccccgcggccgggtgggggcggggagaggcgtagtcacgcccaggctgcttccgcccgccccaacagcgcgcacgcggccaccgagctggaggaggcggcgggcgtgagaccgggaatgcttggggcccccgccttcctcgcagccatccagcactcggtgcacgccccgcgaggccagcggctgctccctcccggggctattgctgctagtgccgtgagcaccgcccagccattgtctctgtgtctccgtcagccgtgccgagccgcgc

SEQ ID NO: 44914 - DNA, 2300 bp, Homo sapien
tatgcagattggtttccagtaggtttgtgagttttatttatttctcagagatttaaacctttttcctcttggcctgttatttttatgctttaacctatttgatgatgttagtttggaaccaacctgaaactgaagtattccaaacttggactgtaagccaaggaataaaaccctgaaacatgagtgaaattgatacagtcacatcttgcttacagactcaatgtgatacagttagaccctggattcatcctgaaaatcagccactctctccctggccccagactgaagttggtatattttggccctggactcagcaaagagctgctacatttcaaacctggacccacctgaaacccaagcagtgagatcctggatcaagcagaaaactgatgtagtcagatctttgttttacattacaataaataaaggcagatcatgagcttattcaaaatctcaaatagtcagtccctggatgcagacagaagttgacataattcacccttttatgcagtctgaaaccttcctactaagtttctggcccaaggttctatctccagtagtaaaaagatggaccttgcttacaggaagaacactcatatcttggatactgcctgtaaccaaagcagacacacactggatccagtctgaagctgatattattgaatcctttgctgtttttgaagctggcaaagtgagaacctgcatccagcctgaaacagaaatactaagtcccagaacccactataaggctgatataattgcatcattttctcctcctgaaattgagcctaatggagaaacactattaatcagtcattttggctcattgtccaaacatgtacccttttttgccagtaaaaactgtgcctttcccagattagtatattatagttttgttaactgagataactgccacagaaagccaagataaaaatcaattctgtccacccaagccagcttacaagcatttggcttcctggaagagttgtttaccagcactatggcaggaaattaaaaattatccagataaaagaaaaccctgatgtcccatgtacctctcttatctctttttctttctcctttttctttcttgttcacttcaatctccgtgaacactgtgcccttcttgttcagtcttttatttttgtacattcccttcattctgcattttcccaccttgctccatttttttctcctctcctctggtctcctcttctattgtcctatccatagcctcttctgctaattctcttcagaaaatatcttcctcaacatttactgaagagtccattctttctccttctttttcatccttgcatgctgctccagccacacttttaacaaaacaacctctcctgatgcctggatctcaatctggacccaagcctggacaacaacctcttaggcatgcagaactcaacgtttccctgattgagtgtcaactatctgtgatctggaaagaaagtttccaggctttctggctcttcgagacagctgttatttctcatgaaaccacaggcacctttactctagtcatatgtttgagttaatatacttgctacgaagactcttgttgaaccctaaaaccagaatttgtaacatcagaggttatgttctcagaagttcggaagactgaaatttaggttattgtatgaatcagcagagatgtctaaatattgaagaatatcttatttttgccaaataggatttatgagctatgttttataaacacaattctattcagagaacagtattttaaagatagtcttacttcttagaaatagtttattattccacttgacgtatatgaatatatacacacactattggataatagtatattatcttggatataaataataagatatatatatatatcataactgcatatatacatatatatattatttgaagggtaagtatgtagataacaactgtagtatatctaaaattgtaggatgatgtatatttccatgtattttctcagaattgaagatactgaatttccaagcatatttctaaaaacctaaaattagatttcagaaatgggagagtagtaatactaatctcactctattccacaggtttattccttctgcagagtgtggattatgccctggccatgtcctcatgtttcccaacggctgggagtcagaaattggtgaattctgttggatagttactgtgcagctgtctttctccatttctatggtggctccatactaaatgaacagtggatccttaccacagctagatgtgccagtttcaactgtctttctcccatttctgtgctggctcca

SEQ ID NO: 44915 - DNA, 2300 bp, Homo sapien
cttctaatttgcttcccatcacaatgattcattacaataaaacaacaaggagagagacagagcggaatgaatttgaagcagacagtcccagtaaggaaaagggaggtctctcagtgaacacaattaagggtctttctcttttttgaaacacttggggaattttggcagtcacctttgaaatctgctaaaacaaataatgtaaggcaactattcaaggatgccacttcaaggttttaaaaaaagccttaatatttcatagggtttttttgttgttgttgttcagaaaatgaacatgtaaggaagaacaatgaaaaatatcctgaagtatgtgttcaattcttatccattcgattgctgagtgctttcatcaaggccattctctaagcagaggaaaaaaatattcccaacagatgatggcagctaagagggacacacacacacttacacacacacacacacacacacacacacacacacaacatgcatgattaaacaaaataatttttaaaaatccaatacagttccaaactcaacaataactgaaaagaaaggccacttgtttcatcttccttttcccccatcttctgcttagtagaagtatatggtaatttgcttctttttaataatttgtaaaatctgatgagtggtgaaatttagccatgcccacatgtcaataacagatgttaaaaatttcagaattataagatcaccaaaataatcacatccaccaaaaaaacctgctggggacagctcatctttttcttttcaacctaccttatgcagaagggtgagcagggcatgcccacatgttgacaaccctggagcccctttttcccagggaggacttgagcaggaaaagcaagatgtaggacagagaaagactaattcataaaggtaagggagtcatgcccttaaaaaagaaacacaaactcttctaaaaggtgagggaaacactcatgtgaggtggtaccatgcagaagagtcacattaccttgaggctgggtccaggcatatgtcacaaccttcccttaggacaagacccaggcaagagagtttcaacaaataggtacatgttccacctttatgttgtaatgcttcatatgggcaaggctcaagcaggtagtcatatcacctaggtaacaggcccagatatatgtcacaatatcctccttgagacatgattctggggaaactctaccaccatctgtgtgccttgcctagcaatatgtcactatccaggtaagccagacccaagcaggagagcagaaatacgaacctgataggccaaggtatttgtcacaatccccttttttggacattaccctagaaaaagagtaccatcaacagtgtgccagtcccagccatgtgctactatcccctagtgtgagtacagcccattctaaagaggagatttgtacaacctaactggttgatacagtgatatgtcacaatgacttctgtgggcatggcttaggcaaaaatgtaacatgacctccgtgctggatctagtgatatatcactcttcttactgagagcaggatccaggcaggaaagtcacattacctagaggttggccaaggtagatataacagtaacatatgtgggctggaaccagtctggagagtcagatcacacaggtgtttggcagagatttatatcacaatcacactggcaaaaaattccctggatgagatttacaataccacacatgtccttttatcatgagcaacagttggcttcatatatgtaagacagtgacagcgcttactgtcatctggtgtgaatatgagataatttcacctttctgctgggttctgctatgacactctctgtccaagccaagtgctacataaaatatctgaggctgttataatcttctttgagctttttttaccagaaagatatttaatcactcctttttctaaaacaagttataagagtcaaaattacacctatttgtgggatgcacatgtaagagtcattatcatgcctgtgaactgtgcctatatatgtaagaatttactctgtgttgatgaaatagacatgacagtgaagtaacctaaattctgagagagaaatgtgccaatattctccttgtaggtatgttcctggcagaaaagttgcataacttgggggttaaagacaggaatatggcacaatgcccattgtgggcagtgtccagacagaagaagagactcatatcacctaaatgacaaacccagaatatgtcacaatgtatcctgttgaaaggaccaggtaagagagtcacatcatttagatgcagtgcttaggaatgtgac

SEQ ID NO: 44916 - DNA, 2300 bp, Homo sapien
acatgtaaataaagaacacagatggaattgtgactttcatatgtggatcttgctataggtgagatggtaactcatttctggacccaaatcacaggtgtaatagtgggtctcatatctgaacttagcctataagagacatgttgaccgtcctatctggctttaaataaatatttaagattgtgagtcaatataagcatgtaggcctcagagtggtttgcaactctcctgcatgttgcataaagccttcggatgttgtagtgtgtcatacaatgactcagaacacacatgagattgtgacttttatatacacaccaagctaacagttaaaggtgtcacttgaaagatgataaaattattttatttcacaaggccaatatccctaggagttgagaatttttagcttaaattcttttccatgggtgcaatttaaattattgttaggttggattcataatactgtgactcttctgtttggactcaggcaacaggggatattatcatatatttctgggcctatcagctggatgatgtatctctcctcccagtgccctgcccacaggttacactgtgatatatcactatatgtagcaactaggtaatgtgactctttgctcttgcctggatcctcaccactgaagacattgtgagatacaattgtgtgcaaaacctaggtgaattgactctcccctttgtcctggactctacaaaaagagggaataataacatattgctgagcacagcacctagtaagtgtgactacccaacatttttttcaatgctgtatacagtgggcatgatgacatattatttgagattgtacacagatgaaaagactatctgactgggtcctgactacagaggagattataatgtacccctcactaagcatgcagatgatgtgactcttctgtcttgtctttgtccaaaggtgagattgtgatatataactggattcagctcatatgcatagtaataactctcatacctagacccagccaggggtgatattttgactctcatagccagtcttacggccatggaaaaaatcctagatccctcaccagtaagaattcacagaaaagtatgctgctcaggcatattataccaagcctgagtggtacaaactgtgtcataatagacaccaacaaccaggtgatattgtgactcttggatgctgccccagcagacaccattgtcattctcacacataaacagagcctacaaatgaggtactaaatctctcacacataagcagtcgaagattgaaattgttctcatatatgaatctgacccacaggtggtttggtgatatttgaaccatgattcacaagtcctgtagtgctttgattctcctactggaatacaatcttcaagtgggactggggatcttctgactgaatcttggctattgttgagattgtgactcctgaacttcaatccaactcatagaaggtgttcgctctcaaacacaaagccaggacttttgtggtactgtgaaacttatttctgaatatttttgagtttgtgattgacaattatgacttgcctaccatctgagtgttttcagtctcctaccaaggcccagagcacagttgaaattgtgacacatgaacatcaagtatctaagcaatgtataacaccttctatggccatgtgccaaaagacacatttacaagtcacttggacaagcacccagctgatgtgaaatcttagcctgaacactgcctacagctagcattttggcttttatctaggtcaatcatgtaagtgctgtgacttacttatactgccttggccctgtagttctggtgcattgtgacacataactggttattgcacccaagttgtttggtggttttttgaggggggttctcccaatgaaaagctttgtaacttaccacttggttcagcaactatgtaatctttcttttctcttgcctgagacctgtccagcacacagattgtgacatattgctaaactcagcatcaaggtgaggttactctcctgctttgatccttcacacaggggtcattgtgacatatattcaggacaaatgaagaggtgaagtttatcttgtctcttgcctaaaccctccccacagggaggatttggatatatcacagaaaccaacatccagttgatgtgacgactcttctagagtccttcccacaaggaagattgtgacatttcactggtcctgaacccactcaggtgaagtgactttgctttcttctccttgacaacaggtgatgtggtgccaaatacctgagaccaaatcaaaggccttatgatgactctt

SEQ ID NO: 44917 - DNA, 2300 bp, Homo sapien
taacatggctatggtgcataagggccctaaggtcaagacttttagggacctgaagtgggttatcacaggcagtcttttttcccaatacaaggccagctctgtctgtaccattttcctctgcctaagaaggctgacagttcagtctgtctcactaatatgcatgtggtagtctcatgacaccaggcccaagctgtgacctgtggctagcatcacaatgaatttgacctttgcctagtgacaagtccctgcaccttggtggagaaagagaccactgtggaagtgcatcagtggtggactcgtcttctctgtgttatccaccagatagtaccaggatccaaggagagggcagatgtgagccagcctgaagagatatcaagcagagccccagaaattgtgaaattcctaagggtccaaaagaatctgcaggattcctcatactagcctagttgatgtaggggtgagtcttattgaaacatgccccactgtgatttctaggttcagccctcctgcttttcctggtgttgctctctttcagttggggcttcctatagaatgagacagcctcagaagctaccaggctgtgtatttctgtgggagtattgtgagtgttggatatctgtgggtgtgtgtggctgtgtgtgtgtgtgtttctgcctctaagttgtttctccttaaaggaatgtggctaacacactgcagggctttttattttttagcgtcttaacctttgggtggcctgtctgtgtggctgtacttgggctgtgggctctgtgggctccctgttctttatgtttctgtgggtcatgaatccacaatgaacaggtaggctagttgtgaccagccagggtctccattatcttcccctgcaaataaaggcactcttctagaaagaagagtggaatacaacacccaggaacagacatcgtctggtgtttcattgcaatatgaccaatccagagagagacactagcagtcttgtccacatagacccttgaatttatctcaaattcggtttccagctgagcaggtacttcacatcatgagcgggcactcctccatcatctttggatttcaaactgggaaagagattgtgagctgcaataaggtcaaacaggtgaaaatataatttggtgaggggttgatggggccctgtaccttcaccagcaaaaaaggttaagacagtgaaacagaggtgttttaaactgcatccccacattctcttagttgcacaagcagtccacaccatggcccagtgttcaggtgggaatactccaactttcaggaaatatttgtagtgcaaactggggcacactccctgtttaagggctttaataccagaagccaaatgggagtgggatgggctgatgcttggtgggatgtggcctccacacttacctcttcttttcctcacttccatgtccctcattggcatagggtttcctgtgtctggctcaacattttccacactaaacattttcctttcacagaaaatgattctcatgaaaatgcattgtgtgagtttccttctaaacactgtcaagttttaataacagcttatgtgataaatttacaaccttatttccattacagccaacaacatggagacattgttctcccacttctatgggagggatgcttgattcccgtactatgagaagcagaaagacgtgtctggctttcacttggaaaggctgtttcctttcatttgcatatcctttcttattttagagaaggtcttttattggactgttgttggatgggctacctctcaccacatatctttctgatgccattgatttcaggaagcaaaattgactttggttaggctggctgtgctccagattttgaaccattgtcttgttgtgggggctgagattgcttacactttgcaggaggattttgggtccttttacaggaatctttgaatgtttcctggactccaggacaagtaagctcattctctcaggtgggccttgatttgtctttgctttcatgctgggtccacattcaccctcaaaaacaacactggacctttctaggcttgcaatcaccacagatgacctctgagaaaacttatgatcatcatctgtacctgtgagaccacagtttgatgtatggcaacactgctccactttggacatgcctttgtcgtggttcctgcctttcccagagagcccctcggaggcccaaaatgaagagaggcaatgaagtcaagggcccggctatcattcactgacacccacttttggggatcttaggtatgattccattacacaaaaacccttcaacaactcaccaga

SEQ ID NO: 44918 - DNA, 2300 bp, Homo sapien
aaaaaaaaagaaaaaatgaggcaagtctggtggtcacataccatccagcatcaatccattccacttttatttggctccaggtatgagagtgcttgtatgagatgtttgccagtatggcctgaatttgcactccaaatcttcctagagtgttggaatactctcacctgaatatcaggccatggtgtggactgcttgtacaattaagggaatgcgaggatgaagctggaagcaccttctgtgtcatcttttttatttttatttttgcaggtgaagttgtgggttcacatacacccctcaccagactttatcctcacccctatcttaccttattgctgttcacactctagttcctgggatgaaatcccaagatgatggagaattgccccctcatgacatgaaacacctgctccagtgggaacaaaactcgatgtaaagtcaaggggcccaacggactggactgctagtgtttgtccctggtttggccacaggacaatgaaacacttgaagatgtctcttttttggtgtggtgtgcagctgctttttctagaagagtggcttttattttttatttatttatttattttagcagtgggaggtgatgtaagtaaacacctgcaggtctcaggccgcctcccaatttacagtagatttatgatccacataaaaataataaacaaggagccccacagctcaagccaagccgcatggacaggtcatcaactaaagggttggtgactcaaaaaaaaaaaaaaggaagaagtgattacacacacacacacacatacacgatgccacacagacatgcggacattcaacattagcaactctctgacagaaacacagcccagcaactcccttggctgtgtgtttctgcaggaaaccccacctcaagagagccaacctaaggtacagaggcaggctagaaatctgactgtggcaagtttcaaaaagactcatatctacaacccctaggcaggccaaggaatcctgcagattttttgtgtccttaatgattccacaatttattcctggggttgtatttgacgtttcttcaggctggctcttgtctgccctctcttgggatcatggaactatcccatctatcccaaagaagataggcaagagttcgcagccaatgcaactcaacggaagtgaccttctcctccaagccacagagacttggcaccaggcaacaataacatcaattgtgatgctacccagggctcacaaacagtcctggtgccctgagactagtgcatgtgcattcgtgaggcaggatctggtgccaggcttcagagctttcagcctgcctaagcagtgggaaatggtatgggcagagccagcctggcatagggcaaaaggtggcctgtgaaaacccactatgggacactaaacttctcgacctcagggccccttcagaccatttacatggtcgggtctcacaggaggagaaaatattttgagactctgaggtggtcactggaaaagcttcttctgacttcatttccaaaaaaggctgtgtgtgagaatctggttccacagagattggaatatagtaccgtattggaattgttgtgttgttgaaggttctttgggtgatagaatcatacctgagaccacatgtgtggatgtcagtgaaagatggctgggctcttgacctcaccatctccattcatccttgacatcacagaggctttctgggaaatgtaggagccacgacgaagggaagttcaatgcagaatcatgttctcacatctcatatcatcctctaacagttacagataaggtttagacagtgtttcagatgccgtctgtagagacggcaagcatgtaaataatgtccattagttctgttgaggggcattttcgattcctgtgagagggaagaaaaatcaaggctcacctgaaggaaacagctgccttgtgctggagtccatgcaatgttcagtgatttctttcagaagacccaaaagccttcagaaaagtgcaaacgtcagcccctgctatgagacaacgatccacaacctggagcacagactgattaataaaagtcccttttcctctctgaaatctctggcagctacataatctgtggcaagagacagtcccattgagcaacacttcaatgaatgcacccctccaaattgagaaggccatgaagatgaaatgaaatagtctagattcccaggtaaaagactgacacaactgcctgcttctcatccaaaagaaatcatgcagctcttcaatatgtaagagagaacaagtttccttttggtggctgtaatgggaatatacagttt

SEQ ID NO: 44919 - DNA, 2300 bp, Homo sapien
ctgcatttccagagcactttgggatggctctatcttattgctcacattcacctaaatatttaaaatatctgtctcttgtgttatgagcttggattcctttgaaggcaagaataattctttcatcttcttttggtgttcaagacagatgattacacaatgtaaggatgtatcacagaaatgctaattacagtgaataggttgatattgttagtatgttaagtaacaattttgttcaattcctttgtgctaaattgtactttgctgtgctatcaacagaaaaatgagataatgcatggatgaaggtgaactattggtatgggaactacaatggaataaccaaattacatagatcaaggaactacctccttgagaatgagtctatatagcttactaataacatactagatatttgcatgttactcaggatgcatgtcaacatgggcatcatatttctctggcccaactgattgatacagaggtgagcacctaacctaactcaataaaatcacatgaatcttgtgacattaagatggtaatggttggataaatatttttgttctttcccaccagaaaaacatgttggagtatgtagacgtgggaactgatgaaagctactttggaactacttgataatggagtcaacaaagaggagcagagtacatggtgggagtgattctgaagatatcatttaatagcctttatttaggtacaccagaagcaagatatattccttcattgttaaattacttgcaccagtaagtcctcatctttacttaaatttgagaccagatttcagtcactgttagaaaaagtgaatcctaagatgcaattgaaaataattacaatataagctaccattgattgtctgcatatgtgacacatactatgttgaatactttgcttttgatatttcatttaataccaatgacaaccctatgagtcaagttctagtcttcctgttttacagattaataaataattttataaatgttgctcttgctcataataatagggctatcagttgttgagcacattgagtttgccaggtattatactaggattgatatacatgtttagatattcattataaaataatatattgaggtaggcattgccactagcctcaagaaaatgaaaactcagagattataggacttgtccaagttcagatatgtaataagcaacagatagaaaattgaaataataacttgttgacctttgtttgaaagatatattcatattaaggagaactggattccatccctgcattcagctcttattaaatttgcaagtctgttttctttgagccctattttcttcacagtaaaatgaagacaataactccacacattatctaccttccagagatattaagggactcaaatgagaaactaaatataaaagtaaggcataattccccataaaaatgtaagttactacagtcattataattcagtaataaaaatgtgtcccacattctgatgattaaacatatcaaatcaagaattacatctttctaaaacagaaatttatagagtacactttttgtcatattgctgtgctggttatcaagagattcccatgccattactttcattgtagtgatgtgtacaaatttaaattggtgttattcaatttatcacagaagggtactacattatgtcacttggtgtcaattattttcacctttaacatttctgttgaacaattttttatttcaacatagctaccaggtaggaatgtactggaacctagaaacaagaccatcgctaaggaaatttgaagactgagctcacttagatatatcacttataagctgcgatcttgatcaaagtatagataaattatcggcctgtgtttatatctttaagtttgacaattgacgataatgcataccaaagagaaattggagattttcctagaagagaaacaagtctcatagccataaatatgctctgaagaaacagaagcaacagaagaaatctcctaggagacagctcagattcatgtctctgattccagttctaatgggtaaggatagaacttgaacaactttaccttccatgagaagagaatatgcagaatcctggctacagtgaagatggagcaagaatcatcttgtaacaggaatagtcaggtgggcagttgccttccatggaggacagatcactgatgttagcagctttgggaaggaagatgggtaagaagtttactcattacctttatgtcataaagcagaagttctgaggaaaaggaaatcatctcccaacttgtctgtgccttctactcaacccctttct

SEQ ID NO: 44920 - DNA, 2300 bp, Homo sapien
cagccggggctgggtgcctcaggactcacccacagccttcgcagtaactggctgacgcccaccgccttctcaatgattggccgctggaggtaggcgggatttccgggcacggcttctggcgtccttctctctcagggtagctccaggtgtccttcccgcagctggccctgtggtgttccgaagctggatacatacggcctgagggccaggcgaacctcaggctctttgtcctaataaaaagcgcaggtattttctgtttctctggacagctgggtctctcggcaagaatagaaagcaaaggtttgggattttgtctataaaaggggatgggttttctatgtgtgggtgttgaattacgggaggagtcagtggggaaagaactccttagtgctattaagagactcactttcgttaaactcattgatttttcctgaggattctacatttaactgcctaatatgtccgactagttgtgggagatggtgctaaggcgccactgttttcgtgtgcactttttattaaagcgggttttctctgtgaatgtggtcataattcagaatacaggcaatacacttaaccactgcgattaaaaagtcacacttttagttagcacatgtggcgtgtctgatttgcttggatgaaatttgacataaattgtgttactttagtgtatgtagaaatatgggggccataaataatctcagtttcagtttgcctctgtaaagcctgtaattgtctccttcgttgtatgacagtatttgaaacatgtttcatgtatctttggcaccgtaaataatttaaaccgaataatcggtgggtgtaatcgagataaatggagttagatagcctaaaacgggaacaacatagatgagcttaagttattctgttaacctggcacactgacttactcgtgtaatcctagcattttgggaagtggaggtcagaggatggcttgaggtgaggagtttgagaccagcctgggtgacataatggactcctttattggtattttcgcatcagggactggtttagtgaaagacaatttttcctcagacaagggttgcacaggggtagaaggcggcgaggtggacaggtttgggagtgggggctggcggcaggtacccgaggggcacgtggtagggcgggtcttccggtaggagcaatgtgacagaggacaggtggggcagtggggctgccacggggacagggagggccagcgagggagtagggaggatggtttctggatagaactgtaccacctcaggtcatcctcaggcgttacattctccacaaacaggtattacatgtcatcctgtggcatcacattcaggccacagataggtacgggttgaaggctagggttttagaatctgtgacctattgtatatttcaaatcactagaagattgtaaaatatttaaaatattctccccctagaacattttaagtagcttgatttaatcttttatccaaatatcatgctgagtgtggtgattcacccttgaaatcccatcactttggtaggcccaagccggcagaacacttgagcccaggatttggagactaccttgggcaatatggggaaacccttgtttatttttaaaaacacaaaaaattgcccagctgtggtagaaagcccctgtagtactagcaacttcggaagctgagatgtgggaagatcagttgggctgggtggaggaggctgcagtgaacagtgcactttggcaacaggagacacacatctcaagaaagaaaatatgcaaaacatcacactgtacctcataaatagacagttttcaaataaaattatttaaatgaaggcattcttcatattgcaacttaggaaaattatgatagcttttcttatctaatttttagaaatgagattctgtcagttcatactaaaatgcagcatttgtgtgtgaagttagtgcccctttgctctgagtgttacaaattttacatatttaaagtaagaagtaataaaaagatgtcagcctcaggaagggaattttacttggattttcagcacagtttgtaataaaattttatctttttagcttatttatatctaaatatagataattttttaccatttacagcacaatggtagaggcagatcatcctggcaagcttttcatttgtggcctcaatagagagaccaatgagaagatgcttaaagcagtgtttgggaaatatggtcccatatcagaaggtaactcttaaaaccgtgtgtgtgtgtgtgtgtgtgtgtgtgtgtgtgtttatgtgtattttcacatgtatatttcagtatgtatg

SEQ ID NO: 44921 - DNA, 2300 bp, Homo sapien
tcctccctgaggatgctgtactccaaggagcattccaaagggcctcttgtcctatgccctgggcacaccagaggccagccgccagggttggccattgtcggcctgcgcgcacgctgttgtgcgctgccttgacgacccagaggctcccgcacccgcagcagcggttgcggtgcctgttggtggggctctgcaagcccagggccggggcctctggctcccgagctcctgtgcgcagttgagcctgctggggaccggagccctttggccagtgcgggatctgcgggtccagcggagctcctcaggaaacctgggtccacgtaggtgtgggaccaggttcacagcagggcgacgcccgtgggtcttgcagggagcgggtctgctggggagcgggcccccagagcctacgggtgcggggcatgggctgggctgggctgggctgcgcaggcccagggtctgtgggagcacccaggagaaaaccgtgttcaggctggaggcaatgctggagaggacggccggggtacagagcaaggaggcggccttggaagaggaggcggtgctgaaggtggaagacatcatggctgaggtggaggtggtggttgaggtggagcccgacgtggggtggcagaaggagggccagcgggcacagcctggccctggaccgagcacaccggggccgtcaatggactcgctggaggtccttcacttggagctgggctccgtgaatgccccaggccacagagcatctccgccttgtgagccagagccatatccttgcggctgccgatttgggatggcgggcagcaggggatagtcatcgggcctcggggggtatgggggctgtttggggggaggagccaggtgggaggcgcgtggggtcagccaggaggcaggggatgggggacagcgtgggagccgaggccacgttcccgcagctgtgagggcagctcgcttgtagcagccctgggagcacgtggtagggaaggggagccagggccagcactgacaagggagaatcgcggcgccaaggtccctttgcgcacagcccaaattcgaaggacacgtttccctgggaacgtccctggaggacggggaatctgtatgccattaccagccattgaaccacccctgctctcggtgcctgtttccagcaggctcaccccagaaacacaaggtgcttaagacgggttcgcggcgcatggggctgccgaccacctgacggcgggcaccagctccgcagatgcgcattcttccaactgcaggcgctgcactcaaaggggtgtaggccctgagcctgtataacttcctctggacccacgcaattcccttggagagcgccaggcacgaccctgctgtggcttctaactacaaggcttccctcaggtggacaggcccacccctcagggagactaggataagaggacaccacacacccggacatcagcggagcatgtccagcacccagcacacaaaggcctcctgcatctcagaaacccagagaagcagccgcctcacaccaccccccgcccctcccgtccctcagctgcaaccacctgcccactttttctgcctccggtctctggtcagcccaggccgtcttggccggggtccacccactccaaaaaccaccacagttgtggcgttgcctcctccccagacagagatagagggccaacaatgaagggtgactggccaaatgtctgggagatggccctgttccacattgtctgtgttcttgcgaaattgcaaggcgtcacgaggcttgcccacccaatcctctggagagttcttgcgcagaggtagattgtttggcacacgagatgtcggcgtgggtcagaaagcatgcggaagtcctgctttgctacgtgatggatttgcaggtcaggctggggagcctgggtctgtgggaggagtccagtgtctgagtcagtttgaggtccccctgggaccagggtcgtctcagtggcagagctgggaaagggaaactcatggctcactacagcaagtaggccacctcagcccagctagttgagatggtcccattgaatccatcctctttctccttgatccggcaggtggaggaacacagccatcccggttaccggtggcaggatgatttcctttcatcccaacctttatttccacagtgaaatcatcatgaaggagcactgtgttggcatcctcggtaaggaatgcctcccagcatggtaggagagctggtgtgtgggagggtggaactggcatgaaccttcctgactcctctccctgcaggctacagggtgtctcattccactgcagtccag

SEQ ID NO: 44922 - DNA, 2300 bp, Homo sapien
aggcagaaaaagtgggcaggtggttgcagctgagggacgggaggggcggggggtggtgtgaggcggctgcttctctgggtttctgagatgcaggaggcctttgtgtgctgggtgctggacatgctccgctgatgtccgggtgtgtggtgtcctcttatcctagtctccctgaggggtgggcctgtccacctgagggaagccttgtagttagaagccacagcagggtcgtgcctggcgctctccaagggaattgcgtgggtccagaggaagttatacaggctcagggcctacacccctttgagtgcagcgcctgcagttggaagaatgcgcatctgcggagctggtgcccgccgtcaggtggtcggcagccccatgcgccgcgaacccgtcttaagcaccttgtgtttctggggtgagcctgctggaaacaggcaccgagagcaggggtggttcaatggctggtaatggcatacagattccccgtcctccagggacgttcccagggaaacgtgtccttcgaatttgggctgtgcgcaaagggaccttggcgccgcgattctcccttgtcagtgctggccctggctccccttccctaccacgtgctcccagggctgctacaagcgagctgccctcacagctgcgggaacgtggcctcggctcccacgctgtcccccatcccctgcctcctggctgaccccacgcgcctcccacctggctcctccccccaaacagcccccataccccccgaggcccgatgactatcccctgctgcccgccatcccaaatcggcagccgcaaggatatggctctggctcacaaggcggagatgctctgtggcctggggcattcacggagcccagctccaagtgaaggacctccagcgagtccattgacggccccggtgtgctcggtccagggccaggctgtgcccgctggccctccttctgccaccccacgtcgggctccacctcaaccaccacctccacctcagccatgatgtcttccaccttcagcaccgcctcctcttccaaggccgcctccttgctctgtaccccggccgtcctctccagcattgcctccagcctgaacacggttttctcctgggtgctcccacagaccctgggcctgcgcagcccagcccagcccagcccatgccccgcacccgtaggctctgggggcccgctccccagcagacccgctccctgcaagacccacgggcgtcgccctgctgtgaacctggtcccacacctacgtggacccaggtttcctgaggagctccgctggacccgcagatcccgcactggccaaagggctccggtccccagcaggctcaactgcgcacaggagctcgggagccagaggccccggccctgggcttgcagagccccaccaacaggcaccgcaaccgctgctgcgggtgcgggagcctctgggtcgtcaaggcagcgcacaacagcgtgcgcgcaggccgacaatggccaaccctggcggctggcctctggtgtgcccagggcataggacaagaggccctttggaatgctccttggagtacagcatcctcagggaggaagcatggtactcggagcctctatttgcctcgacctgtgagagtgtgtgccggggctctggcctctacagcagatcaattccacctcagcaccggcaggcgactttcctcccacgtgcccgccccgatcacttcccccaggacacccctgccgccctagccccagcaaccagagagagttctctgcatctgctgtattacctccgtaccatctacctggcctgcctaacgaagagagatgtttcctgtgttcatgacacatagagatgttcatggcttgccacactgaggatgtcagggcacagggctgccatgcccacaattccaaaggccacgcagcccgcgtgtgcccggatgcctagctacccggcacaagctccaagggcttctcggaggaggcttgggcagggaaggcgggggttgggggggctggagatgcaggcccgccagtggctgtgccgcccagggagacgcccaccgccctcccattgactggccacgacgggaggaagtcggcctgggtgcggccccccggcccttcgcgcgcagtcccttagggggcgcctggaagcccggcgcatgcgccctgagggctcgctgacctaccgggtgccagagaggctgcggcagggtttctgtggcgtgggtcgggcagcacaggccttggtgtgtgcgagtgccaaggagggcaccgccttcaggatggaggctgtacaggagggggcggccgggg

SEQ ID NO: 44923 - DNA, 2300 bp, Homo sapien
aggcagaaaaagtgggcaggtggttgcagctgagggacgggaggggccgggggtggtgtgaggcggctgcttctctgggtttctgagatgcaggaggcctttgtgtgctgggtgctggacatgctccgctgatgtccgggtgtgtggtgtcctcttatcctagtctccctgaggggtgggcctgtccacctgagggaagccttgtagttagaagccacagcagggtcgtgcctggcgctctccaagggaattgcgtgggtccagaggaagttatacaggctcagggcctacacgcctttgagtgcagcgcctgcagttggatgaatgcgcatctgcggagctggtgcccgccgtcaggtggtcggcagccccatgcgccgcgaacccgtcttaagcaccttgtgtttctggggtgagcctgctggaaacaggcaccgagagcaggggtggttcaatggctggtaatggcatacagattccccgtcctccagggacgttcccagggaaacgcgtccttcgaatttgggctgtgcgcaaagggaccttggcgccgcgattctcccttgtcagtgctggccctggctccccttccctaccacgtgctcccagggctgctacaagcgagctgccctcacagctgcgggaacgtggcctcggctcccacgctgtcccccatcccctgcctcctggctgaccccacgtgcctcccacctggctcctccccgcaaacagcccccataccccccgaggcccgatgactatcccctgctgcccgccatcccaaatcggcagccgcaaggatatggctctggctcacaaggcggagatgctctgtggcctggggcattcacggagcccagctccaagtgaaggacctccagcgagtccattgacggccccggtgtgctcggtccagggccaggctgtgcccgctggccctccttctgccaccccacgtcgggctccacctcaaccaccacctccacctcagccatgatgtcttccaccttcagcaccgcctcctcttccaaggccgcctccttgctctgtaccccggccgtcctctccagcattgcctccagcctgaacacggttttctcctgggtgctcccacagaccctgggcctgcgcagcccagcccagcccagcccatgccccgcacccgtaggctctgggggcccgctccccagcagacccgctccctgcaagacccacgggcgtcgccctgctgagaaactggtcccacacctacgtggacccaggtttcctgaggagctccgctggacccgcagatcccgcactggccaaagggctccggtccccagcaggctcaactgcgcacaggagctcgggagccagaggccccggccctgggcttgcagagccccaccaacaggcaccgcaaccgctgctgcgggtgcgggagcctctgggtcgtcaaggcagcgcacaacagcgtgcgcgcaggccgacaatggccaaccctggcggctggcctctggtgtgcccagggcataggacaagaggccctttggaatgctccttggagtacagcatcctcagggaggaagcatggtactcggagcctctatttgcctcgacctgtgagagtgtgtgccggggctctggcctctacagcagatcaattccacctcagcaccggcaggcgactttcctcccacgtgcccgccccgatcacttcccccaggacacccctgccgccctagccccagcaaccagagagagttctctgcatctgctgtattacctccgtaccatctacctggcctgcctaacgaagagagatgtttcctgtgttcatgacacatagagatgttcatggcttgccacactgaggatgtcagggcacagggctgccatgcccacaattccaaaggccacgcagcccgcgtgtgcccggatgcctagctacccggcacaagctccaagggcttctcggaggaggcttgggcagggaaggcggggggtgggggggctggagatgcaggcccgccagtggctgtgccgcccagggagacgcccaccgccctcccattgactggccacgacgggaggaagtcggcctgggtgcggccccccggcccttcgcgcgcagtcccttagggggcgcctggaagcccggcgcatgcgccctgagggctcgctgacctactgggtgccagagaggctgcggcagggtttctgtggcgtgggtcgggcagcacaggccttggtgtgtgcgagtgccaaggagggcaccgccttcaggatggaggctgtacaggagggggcggccgggg

SEQ ID NO: 44924 - DNA, 2300 bp, Homo sapien
ggcagaaaaagtgggcaggtggttgcagctgagggacgggagggaccgggggtggtgtgaggcggctgcttctctgagtttctgagatgcaggaggcctttgtgtgctgggtgctggacatgctccgctgatgtccgggtgtgtggtgtcctcttatcctagtctccctgaggggtgggcctgtccacctgagggaagccttgtagttagaagccacagcagggtcgtgcctggcgctctccaagggaattgcgtgggtccagaggaagttatacaggctcagggcctacacgcctttgagtgcagcgcctgcagttggatgaatgcgcatctgcggagctggtgcccgccgtcaggtggtcggcagccccatgcgccgcgaacccgtcttaagcaccttgtgtttctggggtgagcctgctggaaacaggcaccgagagcaggggtggttcaatggctggtaatggcatacagattccccgtcctccagggacgttcccagggaaacgcgtccttcgaatttgggctgtgcgcaaagggaccttggcgccgcgattctcccttgtcagtgctggccctggctccccttccctaccacgtgctcccagggctgctacaagcgagctgccctcacagctgcgggaacgtggcctcggctcccacgctgtgccccatcccctgcctcctggctgaccccacgtgcctcccacctggctcctccccccaaacagcccccataccccccgaggcccgatgactatcccctgctgcccgccatcccaaatcggcagccgcaaggatatggctctggctcacaaggcggagatgctctgtggcctggggcattcacggagcccagctccaagtgaaggacctccagtgagtccattgacggccccggtgtgctcggtccagggccaggctgtgcccgctggccctccttctgccaccccacgtcgggctccacctcaaccaccacctccacctcagccatgatgtcttccaccttcagcaccgcctcctcttccaaggccgcctccttgctctgtaccccggccgtcctctccagcattgcctccagcctgaacacggttttctcctgggtgctcccacagaccctgggcctgcgcagcccagcccagcccagcccatgccccgcacccgtaggctctgggggcccgctccccagcagacccgctccctgcaagacccacgggcgtcgccctgctgtgaacctggtcccacacctacgtggacccaggtttcctgaggagctccgctggacccgcagatcccgcactggccaaagggctccggtccccagcaggctcaactgcgcacaggagctcgggagccagaggccccggccctgggcttgcagagccccaccaacaggcaccgcaaccgctgctgcgggtgcgggagcctctgggtcgtcaaggcagcgcacaacagcgtgtgtgcaggccgacaatggccaaccctggcggctggcctctggtgtgcccagggcataggacaagaggccctttggaatgctccttggagtacagcatcctcagggaggaagcatggtactcggagcctctatttgcctcgacctgtgagagtgtgtgccggggctctggcctctacagcagatcaattccacctcagcaccggcaggcgactttcctcccacgtgcccgccccgatcacttcccccaggacacccctgccgccctagccccagcaaccagagagagttctctgcatcttctgtattacctccgtaccatctacctggcctgcctaacgaagagagatgtttcctgtgttcatgacacatagagatgttcatggcttgccacactgaggatgtcagggcacagggctgccatgcccacaattccaaaggccacgcagcccgcgtgtgcccggatgcctagctacccggcacaagctccaagggcttctcggaggaggcttgggcagggaaggcgggggggtgggggggctggagatgcaggcccgccagtggctgtgccgcccagggagacgcccaccgccctcccattgactggccacgacgggaggaagtcggcctgggtgcggccccccggcccttcgcgcgcagtcccttagggggcgcctggaagcccggcgcatgcgccctgagggctcgctgacctaccgggtgccagagaggctgcggcagggtttctgtggcgtgggtcgggcagcacaggccttggtgtgtgcgagtgccaaggagggcaccgccttcaggatggaggctgtgcaggagggggcggccgggg

SEQ ID NO: 44925 - DNA, 2300 bp, Homo sapien
aggcagaaaaagtgggcaggtggttgcagctgagggacgggaggggccgggggtggtgtgaggcggctgcttctctgagtttctgagatgcaggaggcctttgtgtgctgggtgctggacatgctccgctgatgtccgggtgtgtggtgtcctcttatcctagtctccctgaggggtgggcctgtccacctgagggaagccttgtagttagaagccacagcagggtcgtgcctggcgctctccaagggaattgcgtgggtccagaggaagttatacaggctcagggcctacacgcctttgagtgcagcgcctgcagttggatgaatgcgcatctgcggagctggtgcccgccgtcaggtggtcggcagccccatgcgccgcgaacccgtcttaagcaccttgcgtttctggggtgagcctgctggaaacaggcaccgagagcaggggtggttcaatggctggtaatggcatacagattccccgtcctccagggacgttcccagggaaacgcgtccttcgaatttgggctgtgcgcaaagggaccttggcgccgcgattctcccttgtcagtgctggccctggctccccttccctaccacgtgctcccagggctgctacaagcgagctgccctcacagctgcgggaacgtggcctcggctcccacgctgtcccccatcccctgcctcctggctgaccccacgtgcctcccacctggctcctccccccaaacagcccccataccccccgaggcccgatgactatcccctgctgcccgccgtcccaaatcggcagccgcaaggatatggctctggctcacaaggcggagatgctctgtggcctggggcattcacggagcccagctccaagtgaaggacctccagcgagtccattgacggccccggtgtgctcggtccagggccaggctgtgcccgctggccctccttctgccaccccacgtcgggctccacctcaaccaccacctccacctcagccatgatgtcttccaccttcagcaccgcctcctcttccaaggccgcctccttgctctgtaccccggccgtcctctccagcattgcctccagcctgaacacggttttctcctgggtgctcccacagaccctgggcctgcgcagcccagcccagcccagcccatgccccgcacccgtaggctctgggggcccgctccccagcagacccgctccctgcaagacccacgggcgtcgccctgctgtgaacctggtcccacacctacgtggacccaggtttcctgaggagctccgctggacccgcagatcccgcactggccaaagggctccggtccccagcaggctcaactgcgcacaggagctcgggagccagaggccccggccctgggcttgcagagccccaccaacaggcaccgcaaccgctgctgcgggtgcgggagcctctgggtcgtcaaggcagcgcacaacagcgtgcgcgcaggccgacaatggccaaccctggcggctggcctctggtgtgcccagggcataggacaagaggccctttggaatgctccttggagtacagcatcctcagggaggaagcatggtactcggagcctctatttgcctcgacctgtgagagtgtgtgccggggctctggcctctacagcagatcaattccacctcagcaccggcaggcgactttcctcccacgtgcccgccccgatcacttcccccaggacacccctgccgccctagccccagcaaccagagagagttctctgcatctgctgtattacctccgtaccatctacctggcctgcctaacgaagagagatgtttcctgtgttcatgacacatagagatgttcatggcttgccacactgaggatgtcagggcacagggctgccatgcccacaattccaaaggccacgcagcccgcgtgtgcccggatgcctagctacccggcacaagctccaagggcttctcggaggaggcttgggcagggaaggcggggggtgggggggctggagatgcaggcccgccagtggctgtgccgcccagggagacgcccaccgccctcccattgactggccacgacgggaggaagtcggcctgggtgcggccccccggcccttcgcgcgcagtcccttagggggcgcctggaagcccggcgcatgcgccctgagggctcgctgacctaccgggtgccagagaggctgcggcagggtttctgtggcgtgggtcgggcagcacaggccttggtgtgtgcgagtgccaaggagggcaccgccttcaggatggaggctgtacaggagggggcggccgggg

SEQ ID NO: 44926 - DNA, 2300 bp, Homo sapien
ggaggcagaaaaagtgggcaggtggttgcagctgagggacgggagggaccgggggtggtgtgaggcggctgcttctctgagtttctgagatgcaggaggcctttgtgtgctgggtgctggacatgctccgctgatgtccgggtgtgtggtgtcctcttatcctagtctccctgaggggtgggcctgtccacctgagggaagccttgtagttagaagccacagcagggtcgtgcctggcgctctccaagggaattgcgtgggtccataggaagttatacaggctcagggcctacacgcctttgagtgcagcgcctgcagttggatgaatgcgcatctgcggagctggtgcccgccgtcaggtggtcggcagccccatgcgccgcgaacccgtcttaagcaccttgtgtttctggggtgagcctgctggaaacaggcaccgagagcaggggtggttcaatggctggtaatggcatacagattccccgtcctccagggacgttcccagggaaacgcgtccttcgaatttgggctgtgcgcaaagggaccttggcgccgcgattctcccttgtcagtgctggccctggctccccttccctaccacgtgctcccagggctgctacaagcgagctgccctcacagctgcgggaacgtggcctcggctcccacgctgtcccccatcccctgcctcctggctgaccccacgtgcctcccacctggctcctccccccaaacagcccccataccccccgaggcccgatgactatcccctgctgcccgccatcccaaatcggcagccgcaaggatatggctctggctcacaaggcggagatgctctgtggcctggggcattcacggagcccagctccaagtgaaggacctccagcgagtccattgacggccccggtgtgctcggtccagggccaggctgtgcccgctggccctccttctgccaccccacgtcgggctccacctcaaccaccacctccacctcagccatgatgtcttccaccttcagcaccgcctcctcttccaaggccgcctccttgctctgtaccccggccgtcctctccagcattgcctccagcctgaacacggttttctcctgggtgctcccacagaccctgggcctgcgcagcccagcccagcccagcccatgccccgcacccgtaggctctgggggcccgctccccagcagacccgctccctgcaagacccacgcgtcgccctgctgtgaacctggtcccacacctacgtggacccaggtttcctgaggacgtccgctggacccgcagatcccgcactggccaaagggctccggtccccagcaggctcaactgcgcacaggagctcgggagccagaggccccggccctgggcttgcagagccccaccaacaggcaccgcaaccgctgctgcgggtgcgggagcctctgggtcgtcaaggcagcgcacaacagcgtgcgcgcaggccgacaatggccaacctggcggctggcctctggtgtgcccagggcataggacaagaggccctttggaatgctccttggagtacagcatcctcagggaggaagcatggtactcggagcctctatttgcctcgacctgtgagagtgtgtgccggggctctggcctctacagcagatcaattccacctcagcaccggcaggcgactttcctcccacgtgcccgccccgatcacttcccccaggacacccctgccgccctagccccagcaaccagagagagttctctgcatctgctgtattacctccgtaccatctacctggcctgcctaacgaagagagatgtttcctgtgttcatgacacatagagatgttcatggcttgccacactgaggatgtcagggcacagggctgccatgcccacaattccaaaggccacgcagcccgcgtgtgcccggatgcctagctacccggcacaagctccaagggcttctcggaggaggcttgggcagggaaggcaggggggtgggggggctggagatgcaggcccgccagtggctgtgccgcccagggagacgcccaccgccctcccattgattggccacgacgggaggaagtcggcctgggtgcggccccccggcccttcgcgcgcagtcccttagggggcgcctggaagcccggcgcatgcgccctgagggctcgctgacctaccgggtgccagagaggctgcggcagggtttctgtggcgtgggtcgggcagcacaggccttggtgtgtgcgagtgccaaggagggcaccgccttcaggatggaggctgtgcaggagggggcggccgggg

SEQ ID NO: 44927 - DNA, 2300 bp, Homo sapien
aggctccgagtaccatgcttcctccctgaggatgctgtactccaaggagcattccaaagggcctcttgtcctatgccctgggcacaccagaggccagccgccagggttggccattgtcggcctgcgcgcacgctgttgtgcgctgccttgacgacccagaggctcccgcacccgcagcagcggttgcggtgcctgttggtggggctctgcaagcccagggccggggcctctggctcccgagctcctgtgcgcagttgagcctgctggggaccggagccctttggccagtgcgggatctgcgggtccagcggagctcctcaggaaacctgggtccacgtaggtgtgggaccaggttcacagcagggcgacgcccgtgggtcttgcagggagcgggtctgctggggagcgggcccccagagcctacgggtgcggggcatgggctgggctgggctgggctgcgcaggcccagggtctgtgggagcacccaggagaaaaccgtgttcaggctggaggcaatgctggagaggacggccggggtacagagcaaggaggcggccttggaagaggaggcggtgctgaaggtggaagacatcatggctgaggtggaggtggtggttgaggtggagcccgacgtggggtggcagaaggagggccagcgggcacagcctggccctggaccgagcacaccggggccgtcaatggactcgctggaggtccttcacttggagctgggctccgtgaatgccccaggccacagagcatctccgccttgtgagccagagccatatccttgcggctgccgatttgggatggcgggcagcaggggatagtcatcgggcctcggggggtatgggggctgtttgcggggaggagccaggtgggaggcacgtggggtcagccaggaggcaggggatgggggacagcgtgggagccgaggccacgttcccgcagctgtgagggcagctcgcttgtagcagccctgggagcacgtggtagggaaggggagccagggccagcactgacaagggagaatcgcggcgccaaggtccctttgcgcacagcccaaattcgaaggacgcgtttccctgggaacgtccctggaggacggggaatctgtatgccattaccagccattgaaccacccctgctctcggtgcctgtttccagcaggctcaccccagaaacacaaggtgcttaagacgggttcgcggcgcatggggctgccgaccacctgacggcgggcaccagctccgcagatgcgcattcatccaactgcaggcgctgcactcaaaggcgtgtaggccctgagcctgtataacttcctctggacccacgcaattcccttggagagcgccaggcacgaccctgctgtggcttctaactacaaggcttccctcaggtggacaggcccacccctcagggagactaggataagaggacaccacacacccggacatcagcggagcatgtccagcacccagcacacaaaggcctcctgcatctcagaaactcagagaagcagccgcctcacaccacccccggcccctcccgtccctcagctgcaaccacctgcccactttttctgcctcccgtctctggtcagcccaggccgtcttggccggggtccacccactccaaaaaccaccacagttgtggcgttgcctcctcgccagacagagatagagggccaacaatgaagggtgactggccaaatgtctgggagatggccctgttccacattgtctgtgttcttgcgaaattgcaaggcgtcacgaggcttgcccacccaatcctctggagagttcttgcgcagaggtagattgtttggcacacgagatgtcggcgtgggtcggaaagcatgcggaagtcctgctttgctacgtgatggatttgcaggtcaggctggggagcctgggtctgtgggaggagtccagtgtctgagtcagtttgaggtccccctggggaccagggttgtctcagtgggagagctgggaaggggaaactcatggttcactacagctagtaggccacctcagcccggctagttgagatggtcccattgaatccatcctctttctccttgatccggcaggtggaggaactcagccatcccggttaccggtggcaggatgatttcctttcatcccaacctttatttccacagtgaaatcatcatgaaggagcactgtgttggcatcctcggtaaggaatgcctcccagcatggtaggggagctggtgtgtgggagggtgggactggcatgaaccttcctgactcctctccctgcaggctacagggtgt

SEQ ID NO: 44928 - DNA, 2300 bp, Homo sapien
aggcagaaaaagtgggcaggtggttgcagctgagggacgggaggggccgggggtggtgtgaggcggctgcttctctgagtttctgagatgcaggaggcctttgtgtgctgggtgctggacatgctccgctgatgtccgggtgtgtggtgtcctcttatcctagtctccctgaggggtgggcctgtccacctgagggaagccttgtagttagaagccacagcagggtcgtgcctggcgctctccaagggaattgcgtgggtccagaggaagttatacaggctcagggcctacacgcctttgagtgcagcgcctgcagttggatgaatgcgcatctgcggagctggtgcccgccgtcaggtggtcggcagccccatgcgccgcgaacccgtcttaagcaccttgtgtttctggggtgagcctgctggaaacaggcaccgagagcaggggtggttcaatggctggtaatggcatacagattccccgtcctccagggacgttcccagggaaacgcgtccttcgaatttgggctgtgcgcaaagggaccttggcgccgcgattctcccttgtcagtgctggccctggctccccttccctaccacgtgctcccagggctgctacaagcgagctgccctcacagctgcgggaacgtggcctcggctcccacgctgtcccccatcccctgcctcctggctgaccccacgtgcctcccacctggctcctccccgcaaacagcccccataccccccgaggcccgatgactatcccctgctgcccgccatcccaaatcggcagccgcaaggatatggctctggctcacaaggcggagatgctctgtggcctggggcattcacggagcccagctccaagtgaaggacctccagcgagtccattgacggccccggtgtgctcggtccagggccaggctgtgcccgctggccctccttctgccaccccacgtcgggctccacctcaaccaccacctccacctcagccatgatgtcttccaccttcagcaccgcctcctcttccaaggccgcctccttgctctgtaccccggccgtcctctccagcattgcctccagcctgaacacggttttctcctgggtgctcccacagaccctgggcctgcgcagcccagcccagcccagcccatgccccgcacccgtaggctctgggggcccgctccccagcagacccgctccctgcaagacccacgggcgtcgccctgctgtgaacctggtcccacacctacgtggacccaggtttcctgaggagctccgctggacccgcagatcccgcactggccaaagggctccggtccccagcaggctcaactgcgcacaggagctcgggagccagaggccccggccctgggcttgcagagccccaccaacaggcaccgcaaccgctgctgcgggtgcgggagcctctgggtcgtcaaggcagcgcacaacagcgtgcgcgcaggccgacaatggccaaccctggcggctggcctctggtgtgcccagggcataggacaagaggccctttggaatgctccttggagtacagcatcctcagggaggaagcatggtactcggagcctctatttgcctcgacctgtgagagtgtgtgccggggctctggcctctacagcagatcaattccacctcagcaccggcaggcgactttcctcccacgtgcccgccccgatcacttcccccaggacacccctgccgccctagccccagcaaccagagagagttctctgcatctgctgtattacctccgtaccatctacctggcctgcctaacgaagagagatgtttcctgtgttcatgacacatagagatgttcatggcttgccacactgaggatgtcagggcacagggctgccatgcccacaattccaaaggccacgcagcccgcgtgtgcccggatgcctagctacccggcacaagctccaagggcttctcggaggaggcttgggcagggaaggcggggggtgggggggctggagatgcaggcccgccagtggctgtgccgcccagggagacgcccaccgccctcccattgactggccacgacgggaggaagtcggcctgggtgcggccccccggcccttcgcgcgcagtcccttagggggcgcctggaagcccggcgcatgcgccctgagggctcgctgacctaccgggtgccagagaggctgcggcagggtttctgtggcgtgggtcgggcagcacaggccttggtgtgtgcgagtgccaaggagggcaccgccttcaggatggaggctgtacaggagggggcggccgggg

SEQ ID NO: 44929 - DNA, 2300 bp, Homo sapien
aacatctctcttcgttaggcaggccaggtagatggtacggaggtaatacagcagatgcagagaactctctctggttgctggggctagggcggcaggggtgtcctgggggaagtgatcggggcgggcacgtgggaggaaagtcgcctgccggtgctgaggtggaattgatctgctgtagaggccagagccccggcacacactctcacaggtcgaggcaaatagaggctccgagtaccatgcttcctccctgaggatgctgtactccaaggagcattccaaagggcctcttgccctatgccctgggcacaccagaggccagccgccagggttggccattgtcggcctgcgcgcacgctgttgtgcgctgccttgacgacccagaggctcccgcacccgcagcagcggttgcggtgcctgttggtggggctctgcaagcccagggccggggcctctggctcccgagctcctgtgcgcagttgggcctgctggggaccggagccctttggccagtgcgggatctgcgggtccagcggagctcctcaggaaacctgggtccacgtaggtgtgggaccaggttcacagcagggcgacgcccgtgggtcttgcagggagcgggtctgctggggagcgggcccccagagcctacgggtgcggggcatgggctgggctgggctgggctgcgcaggcccagggtctgtgggagcacccaggagaaaaccgtgttcaggctggaggcaatgctggagaggacggccggggtacagagcaaggaggcggccttggaagaggaggcggtgctgaaggtggaagacatcatggctgaggtggaggtggtggttgaggtggagcccgacgtggggtggcagaaggagggccagcggcacagcctggccctggaccgagcacaccggggccgtcaatggactcgctggaggtccttcacttggagctgggctccgtgaatgccccaggccacagagcatctccgccttgtgagccagagccatatccttgcggctgccgatttgggatggcgggcagcaggggatagtcatcgggcctcggggggtatgggggctgtttggggggaggagccaggtgggaggcacgtggggtcagccaggaggcaggggatgggggacagcgtgggagccgaggccacgttcccgcagctgtgagggcagctcgcttgtagcagccctgggagcacgtggtagggaaggggagccagggccagcactgacaagggagaatcgcggcgccaaggtccctttgcgcacagcccaaattcgaaggacgcgtttccctgggaacgtccctggaggacggggaatctgtatgccattaccagccattgaaccacccctgctctcggtgcctgtttccagcaggctcaccccagaaacacaaggtgcttaagacgggttcgcggcgcatggggctgccgaccacctgacggcgggcaccagctccgcagatgcgcattcatccaactgcaggcgctgcactcaaaggcgtgtaggccctgagcctgtataacttcctctggacccacgcaattcccttggagagcgccaggcacgaccctgctgtggcttctaactacaaggcttccctcaggtggacaggcccacccctcagggagactaggataagaggacaccacacacccggacatcagcggagcatgtccagcacccagcacacaaaggcctcctgcatctcagaaactcagagaagcagccgcctcacaccacccccggtccctcccgtccctcagctgcaaccacctgcccactttttctgcctcccgtctctggtcagcccaggccgtcttggccggggtccacccactccaaaaaccaccacagttgtggcgttgctcctcgccagacagagatagagggccaacaatgaagggtgactggccaaatgtctgggagatggccctgttccacattgtctgtgttcttgcgaaattgcaaggcgtcacgaggcttgccacccaatcctctggagagttcttgcgcagaggtagattgtttggcacacgagatgtcggcgtgggtcggaaagcatgcggaagtcctgctttgctacgtgatggatttgcaggtcaggctggggagctgggtctgtgggaggagtccagtgtctgagtcagtttgaggtccccctggggaccagggttgtctcagtgggagagctgggaaggggaaactcatggttcactacagctagtaggccacctcagcccagctagttgagatggtcccattgaatccatcctctttctcctt

SEQ ID NO: 44930 - DNA, 2300 bp, Homo sapien
gaggcagaaaaagtgggcaggtggttgcagctgagggacgggagggaccgggggtggtgtgaggcggctgcttctctgagtttctgagatgcaggaggcctttgtgtgctgggtgctggacatgctccgctgatgtccgggtgtgtggtgtcctcttatcctagtctccctgaggggtgggcctgtccacctgagggaagccttgtagttagaagccacagcagggtcgtgcctggcgctctccaagggaattgcgtgggtccagaggaagttatacaggctcagggcctacacgcctttgagtgcagcgcctgcagttggatgaatgcgcatctgcggagctggtgcccgccgtcaggtggtcggcagccccatgcgccgcgaacccgtcttaagcaccttgtgtttctggggtgagcctgctggaaacaggcaccgagagcaggggtggttcaatggctggtaatggcatacagattccccgtcctccagggacgttcccagggaaacgcgtccttcgaatttgggctgtgcgcaaagggaccttggcgccgcgattctcccttgtcagtgctggccctggctccccttccctaccacgtgctcccagggctgctacaagcgagctgccctcacagctgcgggaacgtggcctcggctcccacgctgtcccccatcccctgcctcctggctgaccccacgtgcctcccacctggctcctccccccaaacagcccccataccccccgaggcccgatgactatcccctgctgcccgccatcccaaatcggcagccgcaaggatatggctctggctcacaaggcggagatgctctgtggcctggggcattcacggagcccagctccaagtgaaggacctccagcgagtccattgacggccccggtgtgctcggtccagggccaggctgtgccgctggccctccttctgccaccccacgtcgggctccacctcaaccaccacctccacctcagccatgatgtcttccaccttcagcaccgcctcctcttccaaggccgcctccttgctctgtaccccggccgtcctctccagcattgcctccagcctgaacacggttttctcctgggtgctcccacagaccctgggcctgcgcagcccagcccagcccagcccatgccccgcacccgtaggctctgggggcccgctccccagcagacccgctccctgcaagacccacgggcgtcgccctgctgtgaacctggtcccacacctacgtggacccaggtttcctgaggagctccgctggacccgcagatcccgcactggccaaagggctccggtccccagcaggcccaactgcgcacaggagctcgggagccagaggccccggccctgggcttgcagagccccaccaacaggcaccgcaaccgctgctgcgggtgcgggagcctctgggtcgtcaaggcagcgcacaacagcgtgcgcgcaggccgacaatggccaaccctggcggctggcctctggtgtgcccagggcatagggcaagaggccctttggaatgctccttggagtacagcatcctcagggaggaagcatggtactcggagcctctatttgcctcgacctgtgagagtgtgtgccggggctctggcctctacagcagatcaattccacctcagcaccggcaggcgactttcctcccacgtgcccgccccgatcacttcccccaggacacccctgccgccctagccccagcaaccagagagagttctctgcatctgctgtattacctccgtaccatctacctggcctgcctaacgaagagagatgtttcctgtgttcatgacacatagagatgttcatggcttgccacactgaggatttcagggcacagggctgccatgcccacaattccaaaggccacgcagcccgcgtgtgcccggatgcctagctacccggcacaagctccaagggcttctcggaggaggcttgggcagggaaggcggggggtgggggggctggagatgcaggcccgccagtggctgtgccgcccagggagacgcccaccgccctcccattgactggccacgacgggaggaagtcggcctgggtgcggccccccggcccttcgcgcgcagtcccttagggggcgcctggaagcccggcgcatgcgccctgagggctcgctgacctaccgggtgccagagaggctgcggcagggtttctgtggcgtgggtcgggcagcacaggccttggtgtgtgcgagtgccaaggagggcaccgccttcaggatggaggctgtacaggagggggcggccgggg

SEQ ID NO: 44931 - DNA, 2300 bp, Homo sapien
aggcagaaaaagtgggcaggtggttgcagctgagggacgggagggaccgggggtggtgtgaggcggctgcttctctgggtttctgagatgcaggaggcctttgtgtgctgggtgctggacatgctccgctgatgtccgggtgtgtggtgtcctcttatcctagtctccctgaggggtgggcctgtccacctgagggaagccttgtagttagaagccacagcagggtcgtgcctggcgctctccaagggaattgcgtgggtccagaggaagttatacaggctcagggcctacacgcctttgagtgcagcgcctgcagttggatgaatgcgcatctgcggagctggtgcccgccgtcaggtggtcggcagccccatgcgccgcgaacccgtcttaagcaccttgtgtttctggggtgagcctgctggaaacaggcaccgagagcaggggtggttcaatggctggtaatggcatacagattccccgtcctccagggacgttcccagggaaacgcgtccttcgaatttgggctgtgcgcaaagggaccttggcgccgcgattctcccttgtcagtgctggccctggctccccttccctaccacgtgctcccagggctgctacaagcgagctgccctcacagctgcgggaacgtggcctcggctcccacgctgtcccccatcccctgcctcctggctgaccccacgtgcctcccacctggctcctccccccaaacagcccctataccccccgaggcccgatgactatcccctgctgcccgccatcccaaatcggcagccgcaaggatatggctctggctcacaaggcggagatgctctgtggcctggggcattcacggagcccagctccaagtgaaggacctccagcgagtccattgacggccccggtgtgctcggtccagggccaggctgtgcccgctggccctccttctgccaccccacgtcgggctccacctcaaccaccacctccacctcagccatgatgtcttccaccttcagcaccgcctcctcttccaaggccgcctccttgctctgtaccccggccgtcctctccagcattgcctccagcctgaacacggttttctcctgggtgctcccacagaccctgggcctgcgcagcccagcccagcccagcccatgccccgcacccgtaggctctgggggcccgctccccagcagacccgctccctgcaagacccacgggcgtcgccctgctgagaacctggtcccacacctacgtggacccaggtttcctgaggagctccgctggacccgcagatcccgcactggccaaagggctccggtccccagcaggctcaactgcgcacaggagctcgggagccagaggccccggccctgggcttgcagagccccaccaacaggcaccgcaaccgctgctgcgggtgcgggagcctctgggtcgtcaaggcagcgcacaacagcgtgcgcgcaggccgacaatggccaaccctggcggctggcctctggtgtgcccagggcataggacaagaggccctttggaatgctccttggagtacagcatcctcagggaggaagcatggtactcggagcctctatttgcctcgacctgtgagagtgtgtgccggggctctggcctctacagcagatcaattccacctcagcaccggcaggcgactttcctcccacgtgcccgccccgatcacttcccccaggacacccctgccgcccttgccccagcaaccagagagagttctctgcatctgctgtattacctccgtaccatctacctggcctgcctaacgaagagagatgtttcctgtgttcatgacacatagagatgttcatggcttgccacactgaggatgtcagggcacagggctgccatgcccacaattccaaaggccacgcagcccgcgtgtgcccggatgcctagctacccggcacaagctccaagggcttctcggaggaggcttgggcagggaaggcggggggtgggggggctggagatgcaggcccgccagtggctgtgccgcccagggagacgcccaccgccctcccattgactggccacgacgggaggaagtcggcctgggtgcggccccccggcccttcgcgcgcagtcccttagggggcgcctggaagcccggcgcatgcgccctgagggctcgctgacctaccgggtgccagagaggctgcggcagggtttctgtggcgtgggtcgggcagcacaggccttggtgtgtgcgagtgccaaggagggcaccgccttcaggatggaggctgtacaggagggggcggccgggg

SEQ ID NO: 44932 - DNA, 2300 bp, Homo sapien
accaccttcaagaaacagaagcccttcaggaagtgtgagatctgcaagaggaagtagtggaggaacaagagggtggcttccctcacatgaaggacacgtgggtaatgttttaaaatataaagatggaaccataggactgaaagaaaataagtttgaagatactggaatttctcaattttttttatttcctttatgaacagaaaattaacatgataagcaaaattatttctaagtactaaagtgtattataagaacgattaaactaatatctaaaatttgttttaacattgtaataactttgcattaaaataacacaaattttaaactgaactgagtttatgaatgctgattgcctgtactcaacaggttttctgcagaattcatttatattcattatactttagagttttctaatttgaggcccagaacttcatatcagttgtattatcaaaatatgatggaatatttaaaactttccaacaggaaaaaagtaactcagtatttaagattgattttgcagtatttgttttatttatgtatacatgtgcaaatatctaagcaaatctattgctttgtaatttcgatacagggagtttgtacattggcctgccataaagcattttcaatttaagaaatgcagaaatttaatttctgaaaagagtctgctactctggaaaggtctaaacaccactgcttcacagatatgtatgtttctttctttgctggagggttaatcactgaaaatgatatttatttgtgatttacacaatagaaatcaggggtcaatttttacataaaaaagaaaaacaaaccacgtatttaaaaaaagaaaaaaaaactattagatggggtgggcaaggtggctcacgccagtcatctcagcacttggggaatatggggcgggtggaccaagaggtcaggagttccagaccagcctggctaacatggtgaaaccctgtctctcccaaagatacaaaaaattatcctggtgcggtggtgtacacctgtaatctcagctactcagggggctgaggcaggaaaattgccggaacctgggaggcagaaactacagtgagctgagatcacaccattgcactccagcctgggggacagggcaagagtccttctcaataaataaatatataaataaacaaacaaacaagcctattggttaacttgtattatgtattaaccaagcttcaaaaatctaacatttaagtttgagttttaataaccagatgtataattaattggagattttttaaaaagttgaaattacagtgtttgctccattttaagatgtatagcttcatggttactttgtctctattcgtcttgagggtgaggttaaataatactctgccatgaaggagaatgtgcatagtctaacctgaaacaccacctggaaattggaatatatctacatttttggtagatatataaaaatatttatatattattcaatgtgcaattcttaaagattattaaaatttagcatagtctaatctgaagattagtgttttgtaagagaatcgtaagaattctatattatattaacaatttttagtgataatgtattttcctgatgtgtcacgttttgatattgtaaatatttaaatttctttgaatggaatttagtttatgatatgctttgaaaatttttcctcataacagaatgatataaacagtcatttttcatttttcttttagtatttttatgtatattatacttagatattttactgatagatttctgctctgtgttcacttcccacttttcccacatctctgtctctcaccaacatattatgattcttgagtttctttctagattttctaaatggacttttattgcatgaattgcactaatttcatatagaaatgttaattttattagtttagataaatatgaatttgtaagattttaatatgtagaaaacctttataaacaaccaaaacttagccatttaagaaacagtgatgttagtcaactaaaaagattttgtttgaaatacacatgatggtggatacactcttgatttcaacatgagttcttctaggggacccattccaattaaaagaagtccatcttcaagaaatggaggtcctcctcctacaaaatctgctcctgtgacaagaagcaatagtcggatgggaggccaaggtaaatgctacctgataaaaagactgtattttttgtatgaataaaaatgagttattttacctgtctgcttaattttaagttcatcaaacaagagaagtgacacatacatgggcataattacagatcgataactttt

SEQ ID NO: 44933 - DNA, 2300 bp, Homo sapien
ttgaattaacactagtagcctacagatggataaactaaattagcaccgtgtaacacatgcccgctagggattcaagaagtgtaagcattcacccatagatggtacctggggtcagaaccccagatcccatccttattgatctcccagctgcaggtaataagggatgttttcccattccaatatgaatctgtttccaatgcagtgtattctgcaatactgcggtgttaccttattgcatatgtttgacaaaataatttacaaactataactaatctgagaagaaaacaaatggtggagaataaggaagaaaaatgaaacattatgtttcacaatgaatgttaacaattataggtatgattaatcaatacatgagaccagccaagcaggtgctttatgtcatgagggagcactactccatcatcttgggctttcattctgggacagagagtgtgagcagctataaggtcagatagagaagaggacacaatctggtgaggtgtggattgtgtcccgcaagtgcacctgcaaaaaaggtgaagacagatgacacagaagttccttgcaactgcattaccacatcctcttaattgcacaagccatgcacaccagggcccggtgttcaagtgggagttctccaacatgccatgaacatgtagagtacaaactggggctgtgcacttagagggctttcaaacaccgggccaaatgggagtgggatggattgatgctgggtgggatgtggcctccacagttgctctttttttttctgacttcgatcttcctcattgaattagggtttccttggtctggctcattgtcttccatactaaacatctcccagttcacaaaggatgaccctcataggaatccattgtgtgattgttttcttctaaacactgtcacattttaatgacttggcagctttaatatttttaaaactgtaaattcctttagagctgccaacagggaaactcttgttttcccacttctatcggagggtggcttgattcatatggaatgagaagcaggcaactgtgtctaatatttgcctggtaatcttggctctgtttcgtttcatctgcacgtcttttcatattgtcacgggtctctttcaatgggctgttgctggatgggactccctctcactgcaggtcttttgactgcaaggaatttcagacagcaaagaagacttcagagagactggctgagctccaggttgtgggtcatggttgcattgttgggggtgaagatttttgcagtttgcaggaggattttgagtcctctgacaagaatcattgaacattgctttgactccagcattttgcagcttgttctctcaggtaagcattgatttttcttggctttcctagggattccacattgcccatcaactgaactactggacaccattttcaggtttgcaattgccacagatggcctctgagacactgtcacaacttcatctgcctataggcaaggccagttcgaggtgagagaacactgctccaccttgaaattgcctttgtagtggttcttgcctttcccagagagcccctgcaaggcccaggatgaagggaggcagtgaggtcaagagcccagccatcttttgcagacacctgcctctggggtctcaggtgtgattccatcacataaagaaccctcaacaactcactggcccctgtcccaatccccatgggacctggttcttgcacatggtctctttcaggaatggagtcagaacaacagtttccagtgaccacctcatagcttctaaatacctcctcttccaccagaactccaccaccaagacgacacgatggggcaataagtttgagacttttagggtcatgcaggcaacctttttctcaataccaggacggctctgcctgtaccattttcctctgcttaggcagctgatggctctgacaggcaggcacctgatcctgtctcatgaatgtgcatgagctagtcttaaagcaccaggtctgagcagtgagctctggctagtgtcacaataaatggaaccattgcctagcgacaagtccctgcacctttgtggagaatgagacctctgtggaggtgtgtcagtggtggactcttgcctgtcttttctgtgggatacacaggacagtgccatgattctagtagatggtagatgtgagccagcccgaaggaacatcaaggagagttccaggaatgaaccgtgaaatccctaaggatccaaaaggatatgcaggttgcctccagcctggttacatgtttcaggggttactctttttaaaacttgtctcaaaatgatt

SEQ ID NO: 44934 - DNA, 2300 bp, Homo sapien; identical to SEQ ID NO: 44909

SEQ ID NO: 44935 - DNA, 2300 bp, Homo sapien
tcatatcttggactgggctttcacccatgaaggtgaagttgagacagggtctcagcggccatctgtggggatggtaagcctgaaagtggtgtcctgttgtgctgttgaggggcactgtgaactcccctggaaagcaaagacaaatcaaggcatacctgggagaatgagctgccttgttccgcggtccagatgatgttcatgattcctgtcagaggacccaaaatcctcttgcaatttggaaaccacatcagtttcaacaatgagacaaggacccacctccttgagcataggcagactacttgaagtcccatttgctgtttgaaatcactggcagctaatctgtggccagaggcagtctcatctagcaatagcctaatgaaagagcccttccatgatgagaagcccgtccagatgaaatgaaacagaggatagattaccaggcaaaagcaagacatggctaagtgctcatcctacaggaattatgcagccctccaatagaagtgggagtttccttggtggtggtggtggtaatgggaatttatgattttaaaagtatcaaagctgcccagtcattaaaacttgacagtgtttagaaggaaacacttatgcaatggattcccatgataatcattctccatgaactgagaaacgtttagtgtagaagtggttgagccatacccaggaaaccctaggccaacaagaaacatggaagtcagtgaaagaagaggcaagtctggaggccacatcccacccagcatccatcaattccactcccatttggctttgagtatgaaagccctcaaatcgggagtttgccaggttggccccaatttgcagtccaaatattttttgcacattggagtactctcacttgaacaccgagccatgttgttgtctgcttgtgcaattaagggaatgcggggatggagttggaaacacattctgtgtcacctgtcttcactatttttacaggtgtagttgtgggaccccatccaccctgaccagattgtatcctcatccctatttgaccttattgctgctcactctctatgtcccagtataaaatcccaagactgtggtggagtgccccctcatgacataaagcacctcctcaggtgggaaacaaatttgaggtaaattcaagtggccctgcagacaggacacttaatgtctctccctcgtttggccaaaggacagacaatgaaacactgggcaatatctcatttttggtgtgacgtgctcctcttctttttagaagattggctttttttggtacggagagatgacttggacacagacatctctcgacctgcctcccaattgactgcggatttatgatcttccaaaaaataaagaacacagggacccataacccaagcagagccacacagccaagccaacaaagtgttggaagaaaaaaaaaaagaagaagctcagaagtgtgtcagccacattattttaagcagagccacttacaggcacacacacacacacacacacacacacacacacaaacacgatgccaaaaacacacacagacatccaacactcacaacactcccacagaaaaatacagcctggcagcacctgagactgtgtggttctgcaggaatcccgacctaggagagagcaaccccaacgaacacagggcaactgtacctagaaatcattgtgggacaagtttcaaaaagactcacccctaaaacttcttggcaggcccatgaaatcttgcagacatttttggattcttagggttttcaatgtttattcctgggatcagctttacctttcttcatgctggttcacatctaccctatcctagggtaatgagactatccagtaaatctcacagagaagacaggtgacagtccactgcccacacaactacatagaggtcttcttctctggcaagccacgggcattgtaactaggcaatggtgacatttattgtgatgctagctagagctcacaatcaggcctggtatcctgagagtagcccatgcacattttaaggcaggctcaggtaaccaactctcagggctgtcatcctgactaagcagaggaaaatggtacaggcagaactgaactagggtgggataaaaggctgcctgagataacccactgccttacccaaaaggtctagactctagagcccttttgggcagtctccatggtcaggtccaactgaaagaggagtcattttgagactgtgaggtggtcgctgcaatctgctcctctgtctccattccaaaaagagactgtgtgtaagagtctgctctcttggggattggaataccatc

SEQ ID NO: 44936 - DNA, 2300 bp, Homo sapien
ggccttaggttgagagttttaggatcctgcagtgggttttcacaggcagcatttttcccaataccagtctggctctgcctgtattattttcctctgcttgggcagactgacaggtctgatggccaggcacctgggcctgcctcacgaatgtgcatgcacaagtctcagggcaccaggactgatattgagctttagtgagcatcccaatgaatgtcattgttgcctagcaacaagtcccttcatctttgcagagaaaaaggcctacgtggagctgcgtggttggtgaactcttgcctgtcttctctgtggaaaccacaggatagtcccatgagcctaggagagggcaaatgagagccagcctgaagaaacatcgaccacagcactaggaataaacctcaaaatccctaaggatccaaaaaaatcggaaggattccttaggcctgcctagactttgtaggtgtgagtctttttgaaacttgcagtactgtgatttctaggagcaggccacctgtattgcctggggttgctctatgccacattagcttcttgcaaaaccacacagccacaggagctgacaaactgtttctgaaagagtgttgtgagagttggatgttggcatgggtgtgtggctttgttttttgtgtgtgtgtgtttgtgtgtgcctgtaagtggagtctgcttaaggaatgtggctaccacactttggtgcttctttttttaattgagtctcacaaatttggtggcctgtctgtgtggctctgcttgggccgcagggctccatgttctttattttcctgtggctcatgaatccacagtgaattgggggccgggctgagacctaccagcatccaagtcacctaccacagcaaaaaaagccactcttctagaatgaagaggagcacaccacaccaaaacaaaacaaaacaaaaaaaaaaaaaaagaaaaaaaaaacaggcatctgccagtgtttcattgtcctgtggccaaccaagaaagagacactgtcagtcctgtcctcatggccccttgaatttaccaagaattcagttcactgccaagcaggttcttctggtcatgagacggcactcctccatcgtctgggcatttatcctgggacatacagggtgagcaggaatagggtcaggtaggagtgaggatacaatctggtgaaggttggatgaagccccacaacttcacctgcaaaaaaaacatgaagacagatgacacagaaggtgcttccaactcaacccccacattcccttaattacacaagtagtccacaccataatgtgggttcaagttggagcactgcaatgtgaaaggaacatttggagtgcaaatccggcccatcctgtcaaacttctgatttgaaggctttcaaacccggagccaaatgggagtggaatgaattgatgttgggtgggatgtggcctccaaacttgcctcttcttttcctcacttgcatgttcctcattggcctggggtttcctgggtttggctgaacaactgttacactaaacatttctgagttcatggagaacatccctcatgggaatccactgagtgagtgttttcttctaaacactgtcacgttttaataactgggcagctttgatgcttttaaaactaaattcccattacagccaccaacaatgaaactcttcttttccctctgctctcagagggctgcatgattcttgtattatgagaagcatgtagctgtgtctagattttgcctggtaatctagcctctgcttcatttcatctgctcctccttctcattgtgaatgggttctttcattgggctgttaatggatgggtatgcctcttgccacagatattttggctgccagggatttcaggaagcaaaatggttatagagtagactggctgcacatcgggttttaggtcattgtcttgttgtggggtctgaggttgtttgcattttgaaagaggctttttatttctgtgacaggaatattggtacattgcttggactctagcacaagtcagctcgttctttcagatgatgcttgatgtttcttggctttcatgggggattcacattgccactcaaccacactactggatacacttttcaggcttgccatcaccacagatggcctctgagacactgtttgaaccacatctgcacctgtgagaggccagtttgaggtatgagaacactgtttcaatttggacttgcctttgtcttggttcctgcttttcccagatagcacctacccaacccaggatgaatgagtgcagagaggtcaagtgccaggccatcttttgctgac

SEQ ID NO: 44937 - DNA, 2300 bp, Homo sapien; identical to SEQ ID NO: 44906

SEQ ID NO: 44938 - DNA, 2300 bp, Homo sapien
aggttgcttaaaggaatgtggctaatgcacataagtgcttctttttgtttgtttgtttttgctctcttaaccttttgatagcctgtccgtgcatctgcttgggctgtggggctctgtgttctttatttttttgtggattatgaatacatagtaaattgagaggctggctaagacctgccagaaaccaaatcaacttccctctataaaaacagccactcttctcgaaagaagaggagcacatcacacctaaaagcagacatctcccagtgtttcattgtaatgaggccaatccggggatagacactagcagtcctatctgcagtgccaattgaatttaccttgaattccattcccagctgagcaggtgctacaggtcttgagcgggtattcctccatcatcttgggatttcattctcagacagagtgtgagcagaaataagatcagattgggatgaggatgcaatcttctgaggggtgaatgaggacccacaccttcatctgcaaaacacatgaagacagttgacagagaatttgcttccaacagcatacccacattcctttaactgtacaactagtccacaacatggcccagtattcaggtgggagtattcaaatgcaaagggaacatttggaatgcaaactggggccatgctggcaaacccctgattttatggctttcatacccagagccaaataggagtgggatgggttgatgcttggtggcaggtggactccatacttcccttttctttttctgacttccatgtttctcatcatcctagggtatcctgggtctgcctcaacgtcttccatacttaaaatttttcagttaattgcaaacaaccctcatgggaatccattgcaagagtgattccttctaaacactgtcatgttttaatgactgggcagctgtgatacttttaaaaccataaattcccattacttcagtcaacaaggaaacttgttcacccagttacattggagggctgcataattcctataggatgagaaacaggcagccccactggcttttgagtgggagtctagaatatattttattgcatctgcacatcctttctcactgtgtgtgacattcattgggttgttgctggatgagactgcctctcaccgcagatcttttcactgccaaagatttcaaggagcaaaagggattttgagtaggctggcagcactccaggttgtgggtcaggtctgtttttggaggctgggttttttgcaaattggagaaggctttttgtgtgctgacaggaatctttgaatgttgctttgactccaacacaaggcagctcattctagcagttgagccttgatttatctttattctcatggagaatccacagtgcctctcaatagcactactggacagccttttcaggcttgtaatcaccacagttggccttgaagacactgtctgaacctcttctgcacctgtgagaagagagtccgaggtgtaagaacactgcttcatcttggacttgctgtgttgtggttcctacctttctgagacaggactgcaagggccaaaatgaagggaagcatcaaggtcgaaggcatgaccatcttttcctaacacccacctctggaatctcaggtatgattccatcatccaaagacccctcaacctctgatcagactatattccaatccccatgggcaaagattctttgacacagcctctttcaggaatggagtctgaatatcgtttccatggaccacctcacagtctcaaaacactgccttgttcagtgggacctgaccagaaagactgcctgaaggtgcggtaatgctgagacttttagagttttgcagagtttatcagaggcatcattttttttgacatcaggccactactgcctataatattttcctctgtttaggaaggctgacagctctgacaacaggacaccagagcctgcctcaccaatgcaatgcactagtctcagggcaccaggcctgagctgtgagctctggctagcatcacaatgaatgccaccattgcctagcgacaagtccctgccataaggtagagaagtagcccttcgtggaggtgcacagaccatggattcttgccttcttctgtgtggggtccacaggatattcccatagttctaggagaggacagacattagcctgcctaaagaaacatcaagcagagccccaggaataaactgtggaattcctaacgattcaaaaagatttgcaggatgcatcagacctgcctagacattgtaagggtgagtctttttgaaatttgccccactgtgatttctaggtacagc

SEQ ID NO: 44939 - DNA, 2300 bp, Homo sapien
atacaggctccgagtaccatgcttcctccctgaggatgctgtactccaaggagcattccaaagggcctctagtcctgtgccctgggcacaccagaggccagccgccagggttggccattgtcggcctgcgcgcacgctgttgtgcactgccttgacgacccagaggctcccgcacccgcagcagccgctgcggtgcctgctggtggggctctgcaagcacagggcctcggcctctggcttctgagctcctatgcgcagttgaccctgctgtggtcctgagccccacggcgagtgcggccatctgcgggcccagcggggctcctcaggaaacctgggtccatgtaggtgtgggactaggttttcagcagggagaggcccgtgggtctttcacggagcgggcctcttggggagcagcccccagagcatagggataccggggatgggctgggctgtgcaggccagggtctgtgggagcacccaggagggcaccgtgttcaggctggaggctctgctggagaggacggccggggtacagagcaaggaggcagccttggaagaggaggcggtgctgaaggtggaagacataatggctgaggtggaggtggtggttgaggaggagactgacgtggggtggcagaaggagggccagcgggcacagcttggccctggacccagcacacccaggccatcaatggactcgctggaggtccttcacttggaggtagactccgtgaatgcccctgtggcctgggcttctgggacagagccatatccttgcagctgccgattccagatggctggcagcaggggatgggcatcgggcttcgtgggggcatgggggctgttgggggaggagccaggaggaggcacatggggtgagccaggaggcaggggatgggggacaggatgggagccgaggtcacgttcctgcagctgtgagggcagcttgcttgtagcagcactgggagcactgggagcacgtggtagggaaggggagccgagcacagcactcacaagggagaatcgcggcgccagagtcccttcacgcacagcacaatgtcaaagggcatgtttccctgggaatgtcctggaggaaggggagtctgcatgacattgccagccattgaatcacccccgctctcagtgcccgtttccagaaggctcgccccagaaacacaaggtgcttaagactcgggttagcggtacatggggctgccgacctccacaaggcaggtactagctccccagatatgctttcttctgcctgccggcgctgcacccaaagggttatagcccctgagcgtatataacctcctttgcacccacccagtccccatggggagcgccaggaactaccctgcagccccttctaactacagggcttcctcaggcagacaggtccacccctcagggagactaggataagaagacaccacacacccggacatcagcagagcatgtccagcacccagcacgcaaaggcctcctgcagctcatgaacccagagaagcagccgcctcacaccaccctgcccccgcccctgcccctcagctgcaaccacctgcccactttttctgcctcccgtctctggtcagcccaggccgtcttggccggggtccagccaccccaaaaaccaccacagttgtggcattgcctcctcaccagacagaaacagaggatcaacatcggagcgtgacaggccaaatgtctgggagatatccctgctccacattctctgtgctcttgcagaattgcaggcgtcaggaggcttgcccactgaatcatctggagactccttgaccagatgtagattgtttggcacaccagatgttgacctgggttggaaaccatgatgaagtgatggatttgcaggtcaggctggggagcctgggtctgtgggaggggtccagtgtctgagtcagtttgaggtccccctggggtccagggttgtctcagttgcaaagctgggaatgggaaattcatgcttcactccagctagcaggccacctcagcccagctagatgaaatggtcccattgaatccatactctttctccttcttggttaggcaggtggaggaactcaggcatccctgttaccggcagcaagatgaagatttccttttgtcacagcctttatttccacaatgaagtgatcagtaagtagtactgcattggcatcctcggtaaggagtgcctcctagcatggtaggggagccggtatgtgggagggtaggtctaggatgaaccttcctgactcctctccctccagggtacagggtatctcattccactgcagtcc

SEQ ID NO: 44940 - DNA, 2300 bp, Homo sapien
tgaatggaatcgaaagggatagaatggaatggagtgtaatgaaaagatatcgaatggaaacgaatggaattgaatggactcgaagggaatggattggaatggaatggactggagttgaatggactcgaatggaatggaaaggagtgccatggaatgcaatgaaatgcaatggaaaggaatagaatggaatggaatggaatgaaactgaatggaatggaatgtagtcgaatataatagaatcaaatggaatggccttgaatataatgaaatgcaatggaatggaatcgaaaggaatggactcaaatggagtagaattgaatggaatggcttcgaatggaatggcatgtaatggaacggacccaaatgtaatggaatcgaacagaacagacacaaatagaatggactgaaaaggaatggtctcgaatggaattttttcgattagaatggaattgaatgcaatgcaatagtgtggaatggaatcgaatggaatcgacaggaatggaatggaatggaatggaatggaatggaatggaatggaatggaatggacgagaatgtaatggattgcaatgcaattggtttgaatggaatgaaatccaatggaatgtaatcaaatggaatgaaaaggtgtacaatggaatggaatagaatggaatgcaatggaatggaatggagtggaatcgagtggaatggaatcgaatataaaggaattgaatgtaatggaatcgaatggaatggactggagtggaatggactcgaaaggaatgaagtggaacaaaatggaatcgaacagattggacttgaatggaatggaatggaatggactcgaatggaatggagtcgaatggaaaggaatcgaaaggaatggaatgaagttgaaagggatagaatggaatcaaaatgaatagaatggaatggagagtaatggaaagatatcaaatggaatggactggaatggaatggaatcgaacggaatgcactggaatggaatggactcgaatggaatcggttggagtggaatggactcaaatggaatggaaacgtttgtaatggaatggaaaggaatagaatggaatgtaatcggatggaatggaatggaatggaatggagtcaaatggaatagaatcgaatggaatggcctcgaaaagaatggataggaatggaatggactcgaatggattggactcgaatggaatagattagaattgaatgacatcaaatggaatggaatggaaccaaatgtaatggactcgaatggaatggattcaaattgaaaggactcaaaaggaatggtcccgaaaggaatttattcgaatagaatggaatcaaacagaatgcagtagtagggaatggaattgaattcaaaggtatcgaaaagaatggaccggaatggaacagtcaagtatagaacagaatcgaatgtaatggattgcaatgcaattggttcaaatggaacggtatcgaatggaatgtaatcaaatggaatggaaaggaattgaatggattacaatggaacggaacggagtggaatcgagggtaatggaatctaatttaatggaatcgaatagaatggactggaatggaatggacacgaaaggaatggactggaagaaaatggaattgaacggattggaatcgagcggaatggaaagtaatggaatggattagaatggagtcgaatggaatggagttgaatggaatggacccgaatggaatggaatcaaaggaaatggactggagtggaatagacacgaaaggaatggaaacgaatgcaatggaatggaatggaagggaatgcaatggaaaggaatggaatggaatggaatggaatggaatggaatggaatagattggaaaggaatgcaatggaatggaatggaatggaatggaatggaatggaatggaatggaattgaattggatggaacaaaatggaattgaatggagtcgaatagaatataatccaaaggaatggcatcgaaaggaatggaatggaaaggaatggattcgaatggaatacaatggaatggaatggtattgaaaggaatggaatggaatggaatggaatggaatggaatggaatggaatggaatggaatgcaatggaatggaatggaatgaaatggaatgcaatggaatggaatggaatgcaatggaatggaatggaatggaatggaatgcaatggaatggaatggaatggaatggaatgcaatggaatggaatggaatggaatgaaatagaatgtactcgaatgaaatggactcaaaaggaatagaatcgtatggaatggcatcgaatggaat

SEQ ID NO: 44941 - DNA, 2300 bp, Homo sapien
aaatagaatggagttaaaggaatggtttcgaatggaattgatttgaatggactggaatcgaatggaatgcaatactatggaatggaatcgaatggaattcaatagaatggaatcgaccagaatggaatggactgtagtagaaactgactagaatgtaatggattgcaatgtaattgattcaaatagactggaattgaatggaatgaaattgtatgtaagggaatggaacacaatagaaatgaaagcaatggaatgcaatggaatgcaatggaaaggaaaggagtgtaatcaagtggaatggaatcgaatttaatggaaatgaatggaatgtaatcgaatggaatggactggaatggaatagaatcgaatggaatagactggaaaaaaatggaatcgaattgattggaatcgaacggaaaggaattgaatggaatggaaaggaatggaatcgataggaatggaatcaaatggaagggaatcgaatggaatggaatcaaatagaatggaactgaatggtatctaaaggaatagaatggaattgagtgtaatggaaagatatcgatttgaattgaaagaaatggaatggagtcaaatggaatggatagtaatggaattgacttgaatggaatggactggagtggaatggaatataatggaatggaaatgaatgtaatatggaatagaaagttatagaatggaatggaattggatggaaaggaatgaaatggaatggagtcaaattgaatggaattgaatgcaattgcatctaaaggaattgaatggaatggaatggaatggaatggaatggaatggaatggaatggaatggaatggaatggaatggaatggacccaaatgtaatggactccagtggagtggactcaaatagaacagactcgaaaggagtcgttttgaatggaatttcttcgaattgaatgtaatcgaaaagactgcagtattatagaacagaatccaatgaaaaggaatcgaatggaatggaccaaaatggaatgggctggaatagaaagggcttgaatgtaatggattgcaatttaaatgatgtgaatggaatggaatcgaatggaatgtaaccaaatggaatggaatggaatgcaattgaatggaatggagtggaatcgagtggaatggaatcaagtggagtaaaccggaagggaattgtcaggaattaaatggactcgaatataatggattgcaatgtatttggtttgaatggaatggttacaaataaaatgcaatcaaacggaaaggaatggtatgcaatggaatggaatagaatggaatgcaataaaatttaatggattggaatcgagtggaatggaatcaaatggaatagaatcgaatcaggtggaatcaaatggaatggactggaatacaatggacccgaatggaattgactgcaaccaaatggaaccgaaagattggaatcgaaaggaacggattggaatggaataaattggaatgtactcaaatggaaaggacttgaatggaatggaaccgaatggaatggaatcgaatggaatggaattgaatggaatcgaaagaaatagaatggaatggattgtaatgaaaagatatggaatggaatggaatggaatggaatggaatggaatggaatggaatggaatggattctaatggaatggtgtcgaatggaatgaaattgaatggaatggaatcgaatgtaatgaaattgaatagaatcaaaaggaatagaatggaaaggaatggaatggaaagatatcgaatgaaaaggaatggaatgaaatggactcgaatggaatggattggaatggaatgcacttgaatggagtggactggagaagaatggactcaaatggaaaacaaacgaatggaatggcatggaatggaatcgaatggaatgcaatagaacggaatggaattggatggaatggaaaggaatggaatggagtcgaatggaatataatcgaaaggaatggcaaagaatggaaaggaaaggaatggaatggaatggaatggaatggaatggaatggaatggaatggaatggactcgaacggaatggactagaaaggaatagaatcgaatagaatggcagcgagtggaatggaacggaattgaacggaatggaaaggaagcaaacttaatggaatccaaaggaatggactcaaatagaatggacaagaaggcaagggtctatactggaatttattcgaatagaatggtatcatatggaatgcaatagtatggaatggaattgaatcaaatggaatagaatcggatggaccggaataaaatgtatt

SEQ ID NO: 44942 - DNA, 2300 bp, Homo sapien
aatggaatggactcgaatggagtggagtctaatggaatagaatcgaatggaatggcatcgaatggagtggaatggaatggagtggaagggatccaaatgttatggacacgaatgtaaaggagtcaaatataatggacttgaaatgaatggtctcgaatggaatttatttgaatagaatggaatcaaatggaatgcaacagaatggaatggaatcaaatggaatggactggaatggaatggactggaaaagaacggactccaatataatggattgcaatgcaattgatttcaatctaatggaattgaatggaatgtaatcaaatggaatggaatggaatgcaatagaatgtaatagaatgggatgcaatggaatggaacagagtggaatggagtggaatggaatcaagaggaatggactgggatggagtggagtccaatggaatggactgcaacaaaatggaattgaaaagttttgaatcgaacggaatataattgaatggaatataattgaatggaatggaatggaatggactcgaatgaaatggaatcaaatggaatagaattgaaagaaatcgaaacgaatagaatggaatggagtgtaatggaaagatatcgaatggaaaggaatggaatgcattggaatggaatggattcgacgggaatggactggagtggaatggactcgaatggaatgtactggagtggaaagaagtcgaatggaatgcagtggagtggaatggtctcaaatgaaatggaaactaatggaatggaatggaatggaatggaatggaatggaatggaatggaatggaatggaatgaaatggaatggaatggaatcgggtggaacgtaatggaatagaatggagccgaatggaatagaatcgaatggaatggcaccaaacggaatggaatagaatagaatgcaatggaatggacttgaaaggaatggactcgaattgaatacaatcaaatggaatggcatcgaatggaatggaatggaatgaacccaaatgtaagggattagaattgaatggactcaaatagaatggactgggaagaaatggtcttgaatggaatctcttcgagtagaacggaatcgaatggaatgcaatagcatggaatagaatcgaatgtgttgtaatcgattggaatggaccagattggaatgggctggaatagaacggactcgaatgtaatggattgaaatgcaattgattcgaaagaaatagaatcaaatgaaattcaatcgaatggaatggaccgaaatggaatggacttaaacagaaaggagtagattgtaatggatttcaatataactgattcgaatggaatggaaacgaatggaatgtattcaaatggaatggattggaatgcaatggactggaatatcaagtaatgcaatggaatgcaactgagtggaatcgaatggattagaatcgaatggaatggaagcgaattgaatgaaatcgaatggaatagactggaatggaaaagattcgaatggaatggaatagaacaaaatggaatcgatcggattggaatcgaacagaatggaatggaatggacacgaatggaatgaagttgaaaggaattgagaagaatgtaatagaatcaaatggaatggaaatgaatggaaaccaaaggaatagaatggactcgagtgaaatggaaatataccaaatggagtggaatggaatgcaatggactcgaatggaatagactcgaatgtaatggagtagaatggaacgcaaccgaatggaaaggaatggaatggaatcaaaagtagtagaatggaatgaagggaaatggaaacacatcgaatggaatggaatggaatggaatggaatggaatggaatggaatggactcgaatttaatggacacgaatggaatggatttgaagggaatggaaccgaatgtaatggaatcaaatagaatggaatggaatggaatcacaaggattagaatggaatagagtgtattggaaacatatcgaatagaatggaatggaatggactcaaatggactggaccggaatggtaaggactcgaataggatggaaagtagtagaatggactcgaatgtaatggaaacgaatggaatggaatggaatggaaaggaagagaatggaatggaatctgatggaatggaatgcaagggaatggagtcgaatgaaatagaatcgaatggaatggcatcaaatggaatggaatgcaagggaatggaatgggatggactcgaatggaatggactcgaatgggatagaatcgaatggaatggcaacgaatggaatggaatgg

SEQ ID NO: 44943 - DNA, 2300 bp, Homo sapien
gaatggtttggacttgaaaggaatgcattctcatggaatatattcgaatggaatggcctcgaacggaatggaatggcatggaatggaatggacccaaatgtagtggaaacaaaaggaatggactcaaatagaatggactcgaaaggaatgggctggaatggaattcattcgagtagaatggaatcgaagggaatgcaatagtattgaatggaatcgaatggaatggaccggaatggaatggactggaatagatcggataagaatgtaatggattgcaatgtaatagatttgaatggaatggaaaagaatggattctaatcaaaaggaatggaatatgatgaactggaatggaatagagtggaatgcaatggaatggaacagagtagaatcgagaggattggaatccaatggaatgaaatcaaatggaatggaatcgaatggaatggactggaacaaaatggaattgaattgactggaattgaaaggaacggaatggaatgcaatggaatttaatggattgcactcgaatggaatgaagtggaatcgagtggaatggaatccaatggaatggaattgaatggaatggactggaatggaatagactcgaatggaatggaatggaacaaaatcgaattgaaaggattggaattgaaaggaatggaatgcaatggaatggaatggactccaatcgaatggagtcaaatagaatggaatcgaatggaaaggaattgaatagaatggaattgaatggaatcaaaaggtatagaatggaatggagcgtaatggaaagagatcgtctggattggaatggaatagaacggacatgagaggaatggactggaatggaatggactcgaatggaatgcactggagtggaatggacacgaatgtaacggaaacgaatagaatgtaatttaatggaaagtaacagaatggaaacaaatcagatggaacgaaatggaatggaatggagtagaatggaatacaatcgattggaatggcttcgaatgagatgtaatctaatggaatggactcgaatggtgtgtactcaaatggaatagaatggaatggaatgacattgaatggaatggaatggacccaaatgtaatggaaatgaatggaatggaataaaatagaatggactcaaaagaattggtctccaatggaatttatttgaatagaatgtaatcgaatggaatgcaatagtatggaatggaatcgaatgtaatggaatcaaatggaattgactggaatgtaatggactggaataaaactcactcgaatttaatggattgcaaagtaattgctacaaatggaatagaatcgaatggaatggacgaaaatagaatggactggaatacaacggactcgaatctaatagattgtaatgtaagtgattcgaatggaatggaatagaatggaatgtaatcaaatggaatgaaatggaattcaatggaatggaacagaatggaatgaaatggaatggaatggagtgcaattgagtggaatgcaatagaatggaatggaatcaaatggatttgactggaatggaatggagtcgaatggagtggactggaacaaaatggaatcgaaaggattgtaaatcaatggtatggaatggaatggaaagaattggactctaacggaatggagtcaaatggaatgaaatgaaatggaagggaaaaaaatgaaatggaattgaatggaatcgaaaagaatagtggaatggagagcaatggaaagatatcgaatggaatgaaatggaaaaaaaatggaatcaaatggaatggaatcgagaggaatggattcgaatgaaatggactggaaagggaggtactcgaatggaatggaatggaacaaaatggaatggaacgaattggagttgaactgaattgaatggaatggaaaagagtggaatgtaagggattcgaattgaatggattcgaatggaatggaatcaaaaggaatggaatcgaatagaatggaaatgaatggaatcaaaagaaatagaatggaatggagtgtaatggaaagatatcgaaaggaatcatataaaacggaatggactcgaatggaacagattggaatggaatggattctaatggcatggattggagcggattggacttgaatggaatggaagggaaaggaatggaatggaatggcatgaaatggaatagaatggaatggaattggatggaacggaatagaatggaatagagttgaatttaatacaatcgaatggaaaggcctcgaatggaatagaatggactcgaatgcaatggaaacaaattgaatgg

SEQ ID NO: 44944 - DNA, 2300 bp, Homo sapien
tgttacaagtagtaaaggccttgatactgcttgtttttgcctttataaagtctgcggatcttagtcccaaaatactgtctttggatccactaaatagtaacaggtgaatcttatagcttttgagaaaggtaaaataaaatcccagatccaacagagttctatattaaaatggtggtagtaacatcggtagacctgtgtattagtgtattattacacagtgtattagtatttagtgaaaattgggctgtgatgtttataggatgtatgttatacaataaaaccttaccagcaataaagaaaaaaattagcctatgtctgcatatctatacctatcaagacttcttcaaaggagaagtaaagttagtaagtataaggcaggaattaagttctagagtatcttttgattatgattattacatggggcgcagatgtagagcacaaagtgggctttgttaggggcttagaacacttgcattctatttttttttttttttttttttgagatggagtcttgctcttttcacgttggctggagtgcagtggcactgtctgggatccctgcaacctctgcctccctgattcaggcaattctcctgcttcagcctcctgagtagctgggattacaggtgcctgctctgacagctggctaattttttgtatttttagaacagacggagtttcgccatgttagccaggctgttatcaaactcctgacctcaagcgatctgcccatgtcgacttcccaaagtgctgggattacaggaccgagacaccgtgcctggccaacacttgtacttcttatctttgctggctgatgatcttgggcagttaacttattttttctaaaatttttttatggaaaaccaaggatagcaatacatgtattaagaacttcataagatagtaagttttgcatgatatctaatcctaacaaatctgcaattttgtatgtgtgtgctaggtgagtacaaaaatggacaaataataccaagagtcaatctgcaacatataagaaatatcttcaatcatgagcaagtggggctcataatgggaattcatgactgatttaatatgaaatattaatcgatgtaatataccatactaacagattaaggaacaaaggcgaaattacaactgaatacatcttgcaggagacaacaactaggcttttctcctattcgtccagatagatggtctggcccaggattctacagaagcagctcttccagtcaccccaggcaagggtctcaggatagggtaggtttacttgcatggcacacgatgcgagaagtggtggccccttaaaagctgctctatgaattcccaggcgccgcagcacggtctcaggatctcagcattcaggctcacttttctatgtactgttcatcctgagaaaaacttgaaaactggtgatgttttcatgcaggctgttatcggccagagcagagattaacgatgaagtaaaaaccagtagtgcaagtggaaccgtcagagcaacatagttgggacacaaaagattaatcccttagccatagcacctcgcctggcgttgacttctttcttgactatgccatacactctgcgtcctaccagttcacatcagatttgcagtcttactaaacgcctttcgtactcccacctgtccagtaatcagctgtttccacaagcagttacagaactaaaagcgattaaggacaggaattctatagctgaaggggcagcggatagccagtgccgtcctgggctatttttattgtgtggccctagctgcagctatcccagtgttggtgatgaatacgcttcagtcgggactgaggtttccgtctagggcaccaaggtgttgccagttccgctgcttctgggtatagaaagagtagaaaaggggaagaaaagtagaaacagcaaccgttagcaaagagaggaagacgtaaatcagagcaggggaggccctaggggcggggcttggcgggggtggggtcttggagggtcgcaggtcgcggcgctggggatggtgggagcctgcgcagctggctgggcggtctctttctctctctccttttttttttttttttttttttttttttgtcagccgggttcaatgcgccatattgaagaggacgggtctaatagatcgctggagacacaatttaactgaaccccgcccgttgtggactgactttgatgctctgagtccctccctccttcacgccgctagcaggccctgatgtagattgcctttgtcttacttgggacgtttacctgagcgcttggtgctggtgtcgggaccgggagataggagt

SEQ ID NO: 44945 - DNA, 2300 bp, Homo sapien
gtagagatggggtttcagcgtgttagctagggtggtctcgaacttctgaccttgtgatccaccttacttggcctcccaaagtgctgggattataggcctgagccaccatgcccagccttcccagtttatttttaagccaaacagtttgaggtttggggaaattgacttttcccagtctgggggatgaatctgtagggattctgtagcatggggacacaattactcatctgcaaagaggagagaggaggaaaaaggaaaaagaaggttttgttttttttttttcaagggagtcccagtgattcaggatgtatccaagagaagtgcagactgaaggtggctggttacttacctggaaggaggggaaaacggcatcccttagttcctgtgtgtttccagtgaatacctggggtacacgagggagagaaagaaaaggcgtcccctttatttcttctgtctttatatccctgagtcccagtgactcagcagggtgctttcacgcacgtgtaacaggtaggaattatccgcattcacctatccattgcctattttttctgctgtctgtaacttatctatgccatggatgctagcatgacctgtatccataaaatgggcagtgggggtggagattccaattggcaggaattagtcatgctcacctgcactgtgccccttgactattgtctgccgctggatccctcagatccattttcctttctagagcttcagcctgaagcttggagttcagtttgggacaagcaacttccttaggaaggggcatggtttcattaagtccaggttgccctcaccagactgcagccagcagctgtgagggctacttctttgccatcttcttataagctgaatactcaggtatagctgtgcaacgggtttgtactcagacaatggagagaaagggagaattggggatctggcctagtaagatgccttccaaaagaaaacaaaacctcttgcatagaaaagctccctgtatgtggcagagaaaagaaaagaaaaaaaaaaaaaaacagcttacattcagggcagggaaggtgcttggggtggaaaaagcctctttatgcaaatagattcctcgagcagggagagagacttttaacctctgcttcctgttttcctctaggaacagaaactgcattgttctgaattacatacctgatggctggtccaaatgctctttccacctagtaatatgtttgtagtttgcaacaacacttgcaacattgtaaaagagataagtaccataacatccccgaaaaacaagaagacaaatgccacaggaaaaatgggaattgaatgaggccaacattccctaaccccaagagtgatgggggagggtcctctccagcatcctgtcctctgtagttgcaccactgttcttaactagcttaccagagggttggtgcttcatctgccttcagaaaaatgtctgaggacaagagttcacagaaaaaaagtgaaatttaggtccacatttactcacccttcaggtatcctgagtgagcccccaaaatgataggatttttcttctcagtcacttcgtaagctgatgaaccctggctggtgatgccctgcttgggccttgcatggccatgctggcatgccccagctcacctgtgttatagcttgtacccctttttggtggttctaaaactcttgtcctgcacccatgaagaataaggatgtgctaacaaagtgagcaaggtgggaagttttattgagtcacgaactagtcaggcaaacctgaaaagggacgaggggtttgtcccccttcccaaaggcaggaaggtccctctaatatggctgagtcgggctttttatgggcctagaatgggggaggggcaagccataggtagtactggaaaagtcaacattcgattggttaaaagatactattcagaaagaatcaatcataaatgaaacggcaggcaaaaaggaacagaggttctcattctgggttgtgtttcatacaggactagcagtcagtctttcagcctgtggcctgtttttggctttcaggtggggtttcaccagggacttgcccctgtctaggcatttggctggcttctgtagctatcagactgttgaataattgaactttgtttatttctccatatttttgcagtggtaattccattataaaacctaatgaaacaatgtttttatagatggtgtggaaagacttttctgggctcagaggtgaaactgacccttgtgtatcagcagcatttctgactgactgagagagtgtagtgattaacagagttgtgatgttagttaagaaa

SEQ ID NO: 44946 - DNA, 2300 bp, Homo sapien
tcttgtagttactataaggctaaatcacatttttagccttcttatcttatccaaggaagtgattttagtaaaggtacacatgttggattaatgtggaaaatagtagacttttgtacaaaattaatattgtccttacaaacataagcttgaagtgttttgtataatgaacattgagtttattcagtaaacagtattcaacagatatatatatcaacatctgctgtgtgccaagcagtgttattatcacttcattataaactgtaagagaataagaaaatggaatatgatacatcacaagtgttgcaggaagcatatccatgttattttttgtctgaaatgattagatttcaaaagttgccctttccaaacaaaagttgtattataaatgtctctgaagctaacaaaaaaaacctaacatctgacctggaatataaaaatactttgttaagtaagatacatggtatagagaaaagaaatttcaagttatttttctgtgtaggtaatgacacaaaagaaagaaagcatatatttgtttgtaacttttttttgagacagagttttgctcttgttgcccaggctggattgcagtggggtgatctccgctcactgcaacctcagcctcccaagtagctgggattacgcacatgcaccaccatgcctggctaatttttgcatttttagtagagacagggtttcaccatgttggtcaggctggtctcaagctcctgacttcaggtgatccacccagctttgcctcccaaagtgctggtattacaggtgtgagccaccgcgcccagccttcgtttgcaattttttaaattgactattaaggagaaacagggaagagttggctatgtaaatatgttgcagttaggcagtcctgaaataaaataattgatcattagcaaatcaggcagattttatcattgtcagtgaaaattgctttatgcgtcatgtatgtgttttcacagtatcagaattcaagttaattttatactgccaatttatatcattgttccataatcagtaagtttttttcaactaaagaagtcttaaaagactaatagctttagtaaagtaatgtggtgaactggacatggtggtgtgtttctgtaatcccaactacttgggaggctgaagtgaaagtattccttgtattctggttttgaggctacagtgagccacaaactacaatcatgccactgcagtccagcctgggacacagagcaagaattctatctcttaaaaaaaaaagaaagaaagaaaggaaaagaaatatgaaaaattatgtggcatcattgtccttaatttgctcttagtaatttttgtgagcagctggttagcaatctaagtgagattcctatgtctgactaagtcagattgctaaccagctgctcaagttgccagatctgtaatatttggcaagctatttgtgctgtctgtacttgttttctcatttgttaaaatgttcctaattttaatttgttcctacctacttaggaaagtaactctaatgttaattagattatatgattacatcaaaaaagtactaaatggcacataattaggaactcaaatgttagctactattggatattacaaagttttacatctgcttctgttttagaattcataatgcacttaaaggaattccagatgacagagatgggctgttcgatacaatacagcgctcgaagaatcactatcaaaaacgagcatatcagtgcataaaatgtatggtagctctatttagcagttgtcctgttgcttaccagatcttacaggtgagggtttttctcttataaatttgtagaaacctctgtcacaagtaaggaaatgatcgtgaaatttttgtattagcattttaagctgatactgaaaatcattctaaattctaaatagttttatttttttctaaagggtaacggagatcttaaaagaaaatggacctgggcagtggaatggctaggagatgaacttgaaagaagaccatatactggcaatcctcagtatagttacaacaattggtctcctccagtacaaagcaatgaaacagcaaatggttatttcttagaaagatcacatagtgctaggatgacacttgcaaaagcttgtgaactctgtccagaagaggtaaaaaaaaaaaaggctaccaatggacagcagatggaaatgggaaaaagaaaagtatttttttaatgtgtaggcccatgtttattaatattgtgcttaaaaaaatcatgtgcagttttgtttgctttagtggttagcttgatttgtttgatcttaagttaacaaag

SEQ ID NO: 44947 - DNA, 2300 bp, Homo sapien
ggccaaaaatgtactttaacagtgctccataatacgaatctcataaatgagctggaatagaccctgaggtcttcaagcctagtttctcaagatcgtattttgtaaacttgtgctagcagttttgaatatcacaatgattggcatgggctgctgacattttagcaggcagggctcagggtgttagatgtcctgtaattcagggacattcacagtagaaaatactttggttaggatttaaacctacaaaattgctttaaacataaactcaaaagtattcttaggctggttgcagtggcttgtgtctgcaatcccagcactttgggaggccaaagcaggcagatcccttgagctcaggagtttgagcccagcttgggcaaaatgacaaaaccccttctcagttaaaaaaaaaaaattagcctggcatggtgggtggtgtgcaactgcggtcccagctaccgggaggctaaggtgaattacctgaacctgggaggtggatgctgcagtgagccaagatcccaccactgcactccagcctggatgaggaagtgagatcctgtcacaaaaacaaaaacaaacaaacaaacaaaccaaaaggatttttgaatactttaaacatacagggagtgttttttttccccccgagaaggcaacgactgtataaatttatattgtttttaccattttagaaatactaccgtttgcaaccctgttcataatacagtgagttgtgaatacattctgtttgtatttgcagctaaattaggcaaccacttgtgtatttgtcagtgtagcagtggcggtcatttacatgccaaaatacatattttattataaatattcttttaattatataataattaggtttgttaggggccagaggggtgtcattgtgcatcatttgagtttatttctttgggaggcaaagagagaggaaaggaaggtcaaaaatggagaaggccaataaatttattttatatcacgtgtgaatttaacttgagaatggtaaaggtgtcgacacaaaatatgttataaaaaaggaaatctagttgacaactttaacttgccaaagcagtaaaccaacttcactctgggaacactgaatagaaagtgtatgttccaatcactttgaatgttttaattttaaattcggaaaagcagaaatatttgtgataatgttttgagaatggaggtatttgaattttagcactaggaaaccctttgaaggacggtgtaaaatctggatatttaatctggtttcgctgagagttcagagggaagaagtgtttgtaaaaccacgtatatggctattagttaaagccaggaatctagtactaagcttttttttttttttttttttttttcctgcctgtctgctgaatctggactagagggaggactgagaatttggccaaaaaaagtaactccttctagggcaaaagactatttcccacccactgcagcgcctgtaagttgttacgaacgtaggacaactttggtgtagtggttccttcagtaggccgatccccctcaaccctcattcttttgggcaaccaaaagagtctttcacaatcccatggctaggctggctttggggacgtagtatagcactggttaacctaggttgcagggtgcccagaaaaacaagggacctatgccagtgtgcgttaagggcctaggtcccccggtaggtgtgttatcaccagggtcattcagtatataattgtttcattgtttcgtgaaaacaagggacctatgccagggtgcgttaagggcctaggcctaggtccccttgtaggtgtgttataatcaacgtcattcagtatgtaattgtttcattgtttcttcatcactatgccagggtgcgttaagggcctaggcctaggtcccctggtaggtgtgttatcatcaacgtcattcagtatgtaattgtttcattgtttcttcatcactatgccagggtgcgttaagggcctaggcctaggtcccctggtaggtgtgttatcatcaacgtcattcagtatgtaattgtttcattgtttcttcatcctgtgatgctaaagccgtatgctcataaagcgcaggcacaccggtagaaaaactagaggggtctggagttcctaggtgaaccccagcagcctaaccctgtcaagtctgtcgagcctctggctggtcacacgtgctgcggaatccactcagctttcctcaggtgcagtcaggtccatcctgcagagggaccttctgcggacctgttctttcacctccctaacctgaagattgtattcaaaccaccgtggatcgct

SEQ ID NO: 44948 - DNA, 2300 bp, Homo sapien
tttgtatttgcagctaaattaggcaaccacttgtgtatttgtcagtgtagcagtggcggtcatttacatgccaaaatacatattttattataaatattcttttaattatataataattaggtttgttaggggccagaggggtgtcattgtgcatcatttgagtttatttctttgggaggcaaagagagaggaaaggaaggtcaaaaatggagaaggccaataaatttattttatatcacgtgtgaatttaacttgagaatggtaaaggtgtcgacacaaaatatgttataaaaaaggaaatctagttgacaactttaacttgccaaagcagtaaaccaacttcactctgggaacactgaatagaaagtgtatgttccaatcactttgaatgttttaattttaaattcggaaaagcagaaatatttgtgataatgttttgagaatggaggtatttgaattttagcactaggaaaccctttgaaggacggtgtaaaatctggatatttaatctggtttcgctgagagttcagagggaagaagtgtttgtaaaaccacgtatatggctattagttaaagccaggaatctagtactaagcttttttttttttttttttttttttcctgcctgtctgctgaatctggactagagggaggactgagaatttggccaaaaaaagtaactccttctagggcaaaagactatttcccacccactgcagcgcctgtaagttgttacgaacgtaggacaactttggtgtagtggttccttcagtaggccgatccccctcaaccctcattcttttgggcaaccaaaagagtctttcacaatcccatggctaggctggctttggggacgtagtatagcactggttaacctaggttgcagggtgcccagaaaaacaagggacctatgccagtgtgcgttaagggcctaggtcccccggtaggtgtgttatcaccagggtcattcagtatataattgtttcattgtttcgtgaaaacaagggacctatgccagggtgcgttaagggcctaggcctaggtccccttgtaggtgtgttataatcaacgtcattcagtatgtaattgtttcattgtttcttcatcactatgccagggtgcgttaagggcctaggcctaggtcccctggtaggtgtgttatcatcaacgtcattcagtatgtaattgtttcattgtttcttcatcactatgccagggtgcgttaagggcctaggcctaggtcccctggtaggtgtgttatcatcaacgtcattcagtatgtaattgtttcattgtttcttcatcctgtgatgctaaagccgtatgctcataaagcgcaggcacaccggtagaaaaactagaggggtctggagttcctaggtgaaccccagcagcctaaccctgtcaagtctgtcgagcctctggctggtcacacgtgctgcggaatccactcagctttcctcaggtgcagtcaggtccatcctgcagagggaccttctgcggacctgttctttcacctccctaacctgaagattgtattcaaaccaccgtggatcgctcacgtaaaatggtcactgcgcctaacacctgggatcccgtaacccttatctatcttggcttcagagagttttttgactagttccaactttgctgaagcttgtcaaaggtaggtgacggctagttggaacggaaaaattttacgaaacttcctattctcagaagtaaaagggaagagagagtgcttaaggaagaagggaagttgagggtgggtaaggagggagcgggagttagtggtagattgtcactgtgtttaagatttccccaaggcgaaaaaggcgaaagatatcttgctagatccctagaattcgaaggcattaggagagggcggggatagcaaacatcgcgcgaattttgagaggcgctgggactacgtaatcccgcgatcttatgactaaacgaacgcgatttagggagaagtaacggtagcgataaagggattgggtggtggtggtggaggggtggagccaacgattacgcacgttgtgcgtgctgtcgtatagctgtgggaggggccatattaccgcgtaggctaaccagtgcgcttaatagctgtaggtccagtgtaagagttccgctattcggtctcacacctacagtggactacccgatttttcgcttctcttcagggatgagtcatgtggtggtgaaaaatgaccctgaactggaccagcaggtgagtcaaagtaagcctaccgaggctttctacgggaccctttacttggcctgacggtttgtggcgc

SEQ ID NO: 44949 - DNA, 2300 bp, Homo sapien
tcacctcactgcagcctctgcctcctgggttcaatcaattctcctgccttagtctcccaagtatctggaattttaggcacacaccatcatgcctgactaattgttttttgtatttttagcagagacagggtttcatcatgttgaccatgcttgtcttgaattcctggcctcatatgatccacctacctcagcctcccaaagtgctgggattacaagcatgagccactgtgcctggcctacatttttattcttaatttataagtttcccatttctccatcttctctgatgcttatataccatctccttttgattctaaccatactattagttttgaagtaatatttcattttgtcttttcccaaatggttatttgttaagcatcttttcattaacatattgttaatgggtatattttctttggtgaaatgcatgtttatttcctttgcccattttttaatttggctatttttctttttattattgaaccgtaaattatatgcatgcttattcttgctaaaaattccttctcaagtattaaatgtgtcaatacttttttcttttctgtgagtagtcctttcactttttctgttagtgtcctttgaagtacaaaaattttaattttgatagagtttaattatttgcatttcttggacttcatttgtttttgtcattgctaagaaactattgcctaacccatagttatacagatgtactaattttttttttttgcatgagttttgtgtgatatcttatatttaggtcacattcattttgagttaatttttctgtacattatgagatagaggtccaacttcattcttttacatgtggatttccagtcctcccagaaacattttctcattgcatattcttgaaatatttctggagagaataacaaacattttaagttcagcatttaattttttattacaaatgttaaataaaaatgtgaaaatgttttattatttatatagaactctttgcattgaaaatttagcctgtgaagaacttcgtccatatgcccttagttttgttaatgtgattcacccacagagaaagccagggtaactaaatatgatactataatcagagatagaggatcttaacattgctcactctgtacatattttcatatggatgcaaatgtatttctgccagtttagaatatgtgccatggctttgctacttggcacttataattaacattagtagttatacccctcagtacttttggcttcaggtttttcttcattatcttgtctttggcccaagtataagaatctacagattctttctcataaaacagtgtctacagggaaaaacaaaacaacgctttttctttattacaaaagagaattggagggaggctgaggcatcggagggagactgaggcaggaaacttcctcgaacccaggaggcagaggttgcagtgagctgagattacgccactgcactccagcctaggcaacagagtgaggctccggctcaaaaaaaaagaaggaagaattctgtcttcttaagtgctttcttacatctttttttgttttaatatataattagtaagcttttgtatgttgtccttgttttcatttttagttctctctcatattctcttgatatcattttaaatgaaattaatttaccatttagaaaattccttggtccaaagtaaaatatgaatgaatacatgcttttcttataaattagtataatacctgaatttcatattaattttgtagatgatggaggatgttgagtaccgtgaactggactttgacttttcctgtgacttaatttaatgtgattatagaagatattttctgtgaaatgtgcctgtaaaaacttatttctcaaaaatagtcaatactgctcatgtagatgagtataatttgtataatagaagtgatagcctgttagaggatactaagtatgaatatttttttcttaacctgaaggaagaaaatgagaaaagaacacaacacaaagatcattcagataacgaatccacatcttcagagaagtaagtaacttttagcacccactcaacatttctgtctaaaatacatggatttcatattctctctttttttaagttctggaaggagaaggaaaggaccttttaaaaccataaaatttgggaccaacattgacctctctgataacaaaaagtaagtctccctgccctagtgctatttccatgaactgaatcaatgagggtattgcagaattgggaattgtctagagaactgttttttttctattcctaattatctctctctctttgtttcttgttttttta

SEQ ID NO: 44950 - DNA, 2300 bp, Homo sapien
cccaaatggtcaatgaagaagccccaagccctcacacttccctatgtaaaaaaatttaaaactacctaatgtaggggctgggtgtggtggctcacgcctgtaatcccagcaccttgggaggccgaggcggacagatcacgaggtcaggagatcaacaccatcctggctaacacggtgaaaccccgtctctactaaaaatacaaaaaagttagccgggtgtggtggcatgtgcctgtggtcccagttatttgggaggctgaggcaggagaatggcgtgaacccgggaggcggagcttgtagtgagctgagatcacgccactgcactgcagcctgggtgacaaagcgagactctgtctcaaaaaaaaaaccaaaaaaacaaaacaaaactacctaacataacctgatggaatctatggaaaacaatcacagatctacagcatccaggtaaacaacttagaaaaagtcacactcaaatcagtgggaaatactatagtgttttttacttgtgcttgcctcactccatcaaaggcctggtacagtgttgctacaaaagaggtgtcaatttcgttcctaatttgttccctcaaaagagagaaccttatctgtaacattctaattcatctaaggactgtctaaaatactggtctctgttttgcctaatactaatgcttctcaaaaactttttaaaaattcaatttactgactgggcgcagtggctcacacctataatcccagcactttgggaggccgagacgggcagatcacgaggtcaggagatcgagaccatcctggctaacacagtgaaaccccatctctactaaaaacacaaaaaattagccaggagtggtggtgggcacctatagtcccagctactcgggaggctgaggcagaagaatcgctagaacctgggaggcggagcttgcagtgagccgagatcatgccgctgcactccagcttgggtgacagagtgagactccatctcaccaaaaaaaaaaaaaaaaaaaattccatttatcatgctcagagcctagatttatcatgagaccctggacaaagacactgtaagaacacaacaatgtatcttataaatagtaacgcaaaaataataacgaaatattagtaagatgaattcagaaacacgttatagaaagtttgtatgtaatgaactagtgggttttcctcctgaaattcttgaatgattaacaacatattaaaatcagtcaatttaacacacattaataaaatgaagaaaaaactcacatgatcatctcaactgataagaaatacaatttcacaaaattcaatatccttatatatgagaaaaatattctacaaactaggcacaaatggtaaggtcttcaacataataaaggccatatatgaaaaacacataactttgaacctaggaaggactgacagcttttcttctaagatcaagaccaagataaggacttacagtttggaaaactaaatactgttaacatgtcaatattaccaaaagtgacccacagattcaatgtaacctctatcaaaataccaacaacaatttttgcaggattaaaaaattcatcttggctgggcacagtggctcacgcctgtaatctcagcactttgggaagccaaggtgggcagatcatgaggtcaggagatccagaccaccctggctaacacggtgaaatcccgtctctactaaaaatacaaaaatattaggtggatgtggtggcacaggcggtaatcccagctactcgggaggctgaggcaggtgaatggcatgaacccaggaggcagagcttgcagtgagccgagatcgcaccactgtgctctagcctgggcgacagagtgagactccgtccccaaaaaaaaaaaaaattaatcttaaggaagttcaatagaaaaatgatcttgaaaaacactacttgacttaaaaccatactataaggttacatacagtaaccaaaacagtatggtactgctgttttgacacattgtcagaccaactgagcagaacagaaaacacagaaataaagccatagacctacaactgttaatcttcaacaacaccgataaaaatgagcaatgcggccgggcgcggtggctcacgcctgtaatcccagcactttgggagaccgaggcgggcggatcacgaggtcaggagatcgagaccatcctggctaacacggtgaaaccccgtctctactgaaaatacaaaaaattagccgggcgtggtagcgggcgcctgtagtcccagctactcgggaggctgaggcaggagaatggcgtgaacccgggaggcggagctt

SEQ ID NO: 44951 - DNA, 2300 bp, Homo sapien
taaacatcaaagtttaaatatataatacctatttttggaggaggcaaatctattacttaaaaaaagataccatttcttcacttataaaggaacatttcccctaatgccattaataattaacatttttgtaatatctaatatctggaggtataaccagtaaactatttgatacatggaatattatgcaatttgtcttttgaaaacagtaatcaacagaggcgtttaatatatatgagactttttatagattctttacatagaaaaatatacacaattcctcaacatacatatgccatataatatgagaaaaaaaaattaatcttgggatcccaaaatcactaagtaacggaaaagtcaagctgggaactatgtcactaaacttgcctcccattttattcctaaataagatacgtacaaagataagaagctacatacgttcctcacaacgtgcccacaaggaaattccttgtggacaaaggacagacccaactcaaagttatccctgtgaggcgcacaagagacaactgcatatctgattgcttcctctgccttattatttatttatgtaaaaatacagagttactagccggactaaattctgtattcagtaggaggctgatcaaggactcaaaagcatgcaaactcttgtctcttatctacatttttttttttttttttttttttgagacggagttttgctcttgttgcccaggctggaatgcaatggtgccatctcggctcaccgcaacctccgcctcttgggttcaagcgattcgcctgcctcagtcttcagagtagctgagattacaggcatgcgccaccatgctctgttaattttgtatttttagtagagacggggtttttccatgttggtgacgctggtctgaaactcccaacgttaggtcatctgcccgcctcggcctcccaaagtgctgggattactggcgtaaaccacagcgcccgacctgtctcttatctatttctaacatggaagcccccgcttcgagctgtccctcttacctgaccgaaccaatcatgtttccctaaaacgtacaaaagcaagctgtgccctgaccaccttgggcaaatgtatcatgggtaagtcttgcaaaataaactttttaaattgactaagacctctctcagatatttggggttcagaaataaattcttttacctattatttataattttggttacaattgagaaagtaagaaaaaagtggtgtttttttcttttctaagggttactgcatcttgaaagtgtgatgaaggtcttaattattgttcttataattcctgtccacagaagctcctactcttactgagacctcacggaattatcattatcacaatagaaataaacattttgggtttgtggagtaacttttttttttttttttttttttgctcatcgtttgttgtttagataatatcatgaactgataaatgcagttgccacgttgattccctagggcctggcttaccgactgaggtcataagatattatgccttctctttagacttggtcagtggagaggaaatgggcaaagaaccagcctatggaggtgacaaggccttagggccaaaagtcttgagggtgaaggtttagggcctgcgcagcttccctgccatgccccgcaaggtctcgcattcgcaaggcttgtgacagtgggagcctcattacggactctcctaaagtccatggtgtcctcttttcgcatttgcgccccgtgggtgatgcccgatgccgcccttcccatcgctctcttccccttcaagcgtatcgcaactgcaaaaacacccagcacagacactccattttctatcttaatgcatttaactagcacaacctacaggttgttccatcccagagactacccttttctccatagacgtgaccatcaaccaaccagcggtcagaatcagtcagcctctgtcatgttcctaggtccttggcgaactggctgggcggggtcccagcagcctaggagtacagtggagcaatgcctgacgtaagtcaacaaagatcacgtgagacgaatcagtcgcctagattggctacaactaagtggttgggagcggggaggtcgcggcggctgcgtggggttcgcccgtgacacaattacaactttgtgctggtgctggcaaagtttgtgattttaagaaattctgctgtgctctccagcactgcgagcttctgccttccctgtagtttcccagatgtgatccaggtagccgagttccgctgcccgtgcttcggtagcttaagtctttgcctcagcttttttccttgcagcc

SEQ ID NO: 44952 - DNA, 2300 bp, Homo sapien
tttatcagtatacatatttttgtatcttttgtagttacattttataaaccaggtaagatccaaaaagttacatagaatgtaaggccttaatgttatatactgtctgatttataatctgccaaatgtacatgaaggtatgaggatggatgcagctttgtatttacattcgatatataatgttgggttagagattagctaatttttccaaggtacagcctgtacagagccagaattcaaattcattctttactgcaatttctgtcccacctctatgttgctctatcactttgtaataattacctgcctcaagtgagacaggtaggccttattcctggaaaaggccatattctacattatttgaatgtctgcttgtgcaaatgtatgcatattatcaaaaacctcttggtgtgatggccaccactatgacaattaatatacttactaatatacttatgacaattaatataacattttcaatagtacagctactgaaaatattctgtggtgtagcgattcaactgaaatggaatgagtaaagaacatgatagactataatctataaaatcagagttagttgttagtttcaaaataacaatgaaaacacgtgttactgagcaaaatcagctgggatttccaaaactctcactagtgttatagttttttgtctggaagttctaaactgtcctctcatttaaacatcaaagtttaaatatataatacctatttttggaggaggcaaatctattacttaaaaaaagataccatttcttcacttataaaggaacatttcccctaatgccattaataattaacatttttgtaatatctaatatctggaggtataaccagtaaactatttgatacatggaatattatgcaatttgtcttttgaaaacagtaatcaacagaggcgtttaatatatatgagactttttatagattctttacatagaaaaatatacacaattcctcaacatacatatgccatataatatgagaaaaaaaaattaatcttgggatcccaaaatcactaagtaacggaaaagtcaagctgggaactatgtcactaaacttgcctcccattttattcctaaataagatacgtacaaagataagaagctacatacgttcctcacaacgtgcccacaaggaaattccttgtggacaaaggacagacccaactcaaagttatccctgtgaggcgcacaagagacaactgcatatctgattgcttcctctgccttattatttatttatgtaaaaatacagagttactagccggactaaattctgtattcagtaggaggctgatcaaggactcaaaagcatgcaaactcttgtctcttatctacatttttttttttttttttttttttgagacggagttttgctcttgttgcccaggctggaatgcaatggtgccatctcggctcaccgcaacctccgcctcttgggttcaagcgattcgcctgcctcagtcttcagagtagctgagattacaggcatgcgccaccatgctctgttaattttgtatttttagtagagacggggtttttccatgttggtgacgctggtctgaaactcccaacgttaggtcatctgcccgcctcggcctcccaaagtgctgggattactggcgtaaaccacagcgcccgacctgtctcttatctatttctaacatggaagcccccgcttcgagctgtccctcttacctgaccgaaccaatcatgtttccctaaaacgtacaaaagcaagctgtgccctgaccaccttgggcaaatgtatcatgggtaagtcttgcaaaataaactttttaaattgactaagacctctctcagatatttggggttcagaaataaattcttttacctattatttataattttggttacaattgagaaagtaagaaaaaagtggtgtttttttcttttctaagggttactgcatcttgaaagtgtgatgaaggtcttaattattgttcttataattcctgtccacagaagctcctactcttactgagacctcacggaattatcattatcacaatagaaataaacattttgggtttgtggagtaacttttttttttttttttttttttgctcatcgtttgttgtttagataatatcatgaactgataaatgcagttgccacgttgattccctagggcctggcttaccgactgaggtcataagatattatgccttctctttagacttggtcagtggagaggaaatgggcaaagaaccagcctatggaggtgacaaggccttagggccaaaagtcttgagggtgaaggtt

SEQ ID NO: 44953 - DNA, 2300 bp, Homo sapien
tggactcccaacatggaacagggaagggggactgttaccagacaggtgacattcggtgcacgcacgaacaggtcctgtgccccattcggagggcaagaaggcagccacccagcagaacattacctagggaaccagatggcacctgcctctgctcatccccaccttcttcctccctaggaaaaaggaagtcaagcaattgaagaaacggggaagtctgtgactctaatccccagcgacacaaaaacctgtgccatcaaaataattagcaacggatttctaaaaaacatttgctcaggttacagaaaaaaagaaatattttacacactgccttgtctcagaaataatcacagttaggcctctttgtaaccggcgggtcttcctttcacacgccatttgcaggcgcaggacatggtatttgtaactaatttccattagcaagtgggtcactggaattcacagtcaggtgtcattttgaaaagtgcttccctctacccaaatcttttatatttccagatgcagttgcacttcggagatgtcctagtgctggaagcactcccttaaaaatatagtttgatttttgaattttatcttatgatgttagaggtaatgggactatagtctttggaattcaacacagtccttcttagcaatcactctgacaatttatgaatataaaaaacaagaaggaaaagaatttcctcattgtcaggcagtaagtcaatggcagagcttcaaattgacttattttgctaagagggagctataaactccagacaaattactctacacccagagtgtagagtacaatattaccctacactcaatattactgttgagtgcctacaaaaattatgctaatgaaacaatatggatgttacaaggctgaaagtttctcttttaaaatcactgagggttgctttaccttctgccaaaggcaagaggaacgccagtgaggaagaggtccggggtggggcgcataggcctccactggtctgaaagctgagtcacaggaatgatatccctgtagctgaccaggcactccagggagggacaccgcgcctttgcgtgcgtatgtcctcagtaggtaaagccagtttctcagtaaaacaatgcctgttaccctaggtattactccgacccttaaataatatgcaccagtccgcaagagcaatttttacgctcctgttgtaaaaggggaaaatgcgttttgaaggaagtgttggaaggtgctttgctcattttatctttcgccatcgttgtggttagggggcaatggtgcacctagggtggcgttggggctccccaaccgcccggcagctttcagacgcccttccgagacgtggagcgaaagacttaagcgggcctgtgggtgacatcaactcatttacataggagggctataaagtagcgcctgcccatcccgtcctggcaactccgcggtggacactgtgtagactagatttcactcccttacgcgcctggcttaggtaagccccagggcccctgcatccttactccttctaccctccccttcatgccgcgcttgccccttcattattcgcgtccctgtgaagacatcccctaaagccaagccgagtgattatccccgggaaagctgccttggggaggtggggatgcgaaacaccctagatgctgggtaatgcggtggggaaatcgatgatttaagaacaaagcaaataaaccggcgtttatgtactgccgctcggagggttcgtgttaaaatttcttagtgtgccgaggcgggcggatcacgaggtcaggagatgaagaccatcccggctaaaacggtgaaaccccgtctctactaaaaatacaaaaaattagccgggcgtagtggcgggcgcctgtagtcccagctacttgggaggctgaggcaggagaatggcgtgaacccgggaggcggagcttgcagtgagccgaaatcccgccactgcactccagcctgggcgacagagcgagtctccgtctcaaaaaaaaaaaaaaaaaaaaaaaaaaaaaaaaaaaaaaaaaaaaaaaaaaaaaaaaatttcttagtgtttgctctcaaaggtattgtgcgttgtcttggaggctgagatgtgggaacagacagatcctttgttctgaggctcactcatctcccgagccccgagccgtctcccagcctcagacggctctgcgggctgcatctgtgcagcctggcagcggcggcgctgcgctgtgacattttcacagcccttcttgcagaggcatgtgtgctagggatgccgaaatgccgagagcgccggcaggactagctt

SEQ ID NO: 44954 - DNA, 2300 bp, Homo sapien
tattttgctaagagggagctataaactccagacaaattactctacacccagagtgtagagtacaatattaccctacactcaatattactgttgagtgcctacaaaaattatgctaatgaaacaatatggatgttacaaggctgaaagtttctcttttaaaatcactgagggttgctttaccttctgccaaaggcaagaggaacgccagtgaggaagaggtccggggtggggcgcataggcctccactggtctgaaagctgagtcacaggaatgatatccctgtagctgaccaggcactccagggagggacaccgcgcctttgcgtgcgtatgtcctcagtaggtaaagccagtttctcagtaaaacaatgcctgttaccctaggtattactccgacccttaaataatatgcaccagtccgcaagagcaatttttacgctcctgttgtaaaaggggaaaatgcgttttgaaggaagtgttggaaggtgctttgctcattttatctttcgccatcgttgtggttagggggcaatggtgcacctagggtggcgttggggctccccaaccgcccggcagctttcagacgcccttccgagacgtggagcgaaagacttaagcgggcctgtgggtgacatcaactcatttacataggagggctataaagtagcgcctgcccatcccgtcctggcaactccgcggtggacactgtgtagactagatttcactcccttacgcgcctggcttaggtaagccccagggcccctgcatccttactccttctaccctccccttcatgccgcgcttgccccttcattattcgcgtccctgtgaagacatcccctaaagccaagccgagtgattatccccgggaaagctgccttggggaggtggggatgcgaaacaccctagatgctgggtaatgcggtggggaaatcgatgatttaagaacaaagcaaataaaccggcgtttatgtactgccgctcggagggttcgtgttaaaatttcttagtgtgccgaggcgggcggatcacgaggtcaggagatgaagaccatcccggctaaaacggtgaaaccccgtctctactaaaaatacaaaaaattagccgggcgtagtggcgggcgcctgtagtcccagctacttgggaggctgaggcaggagaatggcgtgaacccgggaggcggagcttgcagtgagccgaaatcccgccactgcactccagcctgggcgacagagcgagtctccgtctcaaaaaaaaaaaaaaaaaaaaaaaaaaaaaaaaaaaaaaaaaaaaaaaaaaaaaaaaatttcttagtgtttgctctcaaaggtattgtgcgttgtcttggaggctgagatgtgggaacagacagatcctttgttctgaggctcactcatctcccgagccccgagccgtctcccagcctcagacggctctgcgggctgcatctgtgcagcctggcagcggcggcgctgcgctgtgacattttcacagcccttcttgcagaggcatgtgtgctagggatgccgaaatgccgagagcgccggcaggactagcttccgggccgcgctttgtgtgctgggctgcagtgtggcgcgggcgaggaagctggtagggcggttgtcgcaagctccagctgcagcctccgcctacgtgagaagactagaaagcgggcgcaggaccaggcctgcgttgtttgcagagaggccgtggctacaaaatggaagtgcttttgcgacctgggctccattttaggaattcttgcccgattttaaccacttgaacgcggaagtggctttcctattctcttccaagccagcctttaattttaaacgctgtaattaacagttcacaggggtcaaattcctttattccggaacattccactttgagagggatctgtcctctttggtcccctgcgttttcaaatatttgaggaaaggtgtcgcctctttttctgtggaaagaggaagctcatgagcgcgaaacagcaggggacggagggcgagaagggctttctcaggttgcgggtcggagggcagaagcacagttcccagtacagagacccggacaggtggctgtttctcacgctcactttggattgctccctacggcttcctccgcagccatgtctgacaaacctggtatggctgagatcgagaaattcgataagtcgaaactgaagaagacagaaacgcaagagaagaatccattgtcttccaaagaaagtaagctccgatcctcccccatctttagaaaggctggaatgcgagcgggcggtgggagggcgggagactggga

SEQ ID NO: 44955 - DNA, 2300 bp, Homo sapien
tttagtaccaagttaagagtgaggagattcctactcaacctatccccatatgtcaaagggggtgattgtctgaacccatgtttaaagaacaagatcacgttgcttctattaatatcatcccatagactggctgccgaaaattcctacaatggatcccatggtgacaccttcttcagttgcctaatcctggttttccttcttgcattgctgcaggtcatgttctttctaaggtgctagctaagcctgagaacctttctgcttcattcatcttccaggatgtgaacaccaccagtcactttacttggaagatggccaaggccaatctctatcagcccatgactgggtttcaagtgacttgggctgaggtcactacggaaagcagacagaacagcctacccaacagcattatttcacagccccagatcctgccttccgtacatcccacctcttgtactatgtccgtgtcattggtatctactgctcctttttactgaccttcagaggtggctacctctgtcattctgtgtgctgtactattgagtcttatttttgcattttcttcttctgagtgtatcttttgcaagtattaacacaacacaaatgtgactgcatagctaagaagtagcataagctgccatctagataaagtttgatggctagagctaactcatgaaaagaccttaccctatcttgtatataagtgattaagccattttcttatatctttgttaacctcatgtctctctggtcccagtggacatggcctgtttgaagtgttgagttggggagggcgggaatagctaaaagaagcttgttgtttgtctgtcttccccccaacttcaaatttggctcgaggctgtaatgagttggcctgtctctcagtccacttaattccctggcttcagaaaaaaaaaatcatctgtgggattttaccttctctgaaaatgcccttagaatagccagctaccattacaaaatccaaaaaggggtggtggggagggaaagaaacacaacttaaatctcagaaggaaaaactccatggaattagagagtagttatcctataaatatacttggtatttttgcattttgaaaagaatgtgttggcataaaaataaacattttcagttatgggcattgacagatattgtgttttaagaaaaacagttggctcattcactgaaatttggattatcaagagttcacatcacaagatgtgcagctgaagactttaaaccatgggaaagtcttatgttaaggaattaaaaaaataaataaaacaccaggagtgagccctaagaactggcacctcagcatattttaactctgccaagtgtcttagtctgccaagaattgagtgaggtgctaagaaaccatatggcagagaacccctacaaatgagaaattgtctataaattaaactatgcctgtagaaagcaaccaaacttgcctctgtatgatattctccagtggaggaaaaactgttctaagctctctgtgcattgtgcattgtctctgaaaggttgtcggtgagcatcctctttcatattgtccccttaggatcactatgtcccaacagtgcccaatcggagaccatctactctttattgactggaagtgcaagtactgaccccaggaggggaggggcctgccaccctcaagatattccagatgtggaagctcccaccctcttcagcacacagtgagtggggtgccagggcattaagccatcctgtcaggtcttgtggacatagagaaaaatcttgctggaaaatgaaaacaaataaatacactattacaggtttctatgagatagggaaattgtcatcatctgaaattctttctccctgtttgtaccgacttactagattctattccaggcacctgtagtatacattgcatagttgatgcttaatttttcttttttctccctcccttcctctttccccattttctcccttctttattcctcccttgtttccttctccaccctctctccctccctttttccttccctctccttttctcctttcctctatccttcattttttttccttccttgcacttttccctatataatgcatgcttttttccttgtcttttaaaccgtaagcacatatgggaaaaaaatctgtagtctcatatcaatctgaaatatttttaaatcaagattctcaaatatcacaatataggaaataatattttactaaggaacttatgttcttgttacatagatattactgtaataaatgtcatgaattttcttcatgatgtgacccaagtccacctttttattgctaa

SEQ ID NO: 44956 - DNA, 2300 bp, Homo sapien
tgaatatctatgtgatgtctggaaaaagcaaaatccttcctaatcattctactacgttttgttggaataatgaattaccacagacatctggtggtaaacatgtaattagcaacctaaagatagctagaattagccagaccaggtaattgatcccaggaagctgaagataactggcctatgccagggagttcaataaccattttcctcaatgcaaaattccaacctcatgttagaagtattacctaatacagtagctttcaactttatccaagtaagtaattaactagagataactacatgaagccagtacctggaataaacaaattcttctcagtactagttgaataaacaactagcaattactaggaaactggttgaacatagaaagtttagtaaccactccagtcaattctgtgttcttactttttttggattgttgactaggtactacggatatggtaactagagttacctgagtaagagttaaatacagaatcctccctaaaatgggaaaaactggttgaagacagaagtataatattgcattctcctcaatatttctcatttcttgctggaataataaggtggttctgtcaatgggcagcagtacctaggttattacaaagtaagaaataagaagagatgactagaataaatatttgataccagaatggtgaaaaaaaaaccattcttttcaaatagaaactctaatttcctgtgtaattagtgagttacaattagtactggagatatctgtatgagatgtggacttcatttcaggggtggggtacatactcaacagatgagctgctgggtcgtatggtagatctattttgattttccaaggaacaattatactattttttataacggctgtgccaattacacgtctgtcaacagcatgtaacagtgaggtgatagttcattgtggttatcatttgcattctctgattattaacgatgttgagcacattttcatatacctgttggccagttgtgtgttttctttctagaaatgcctattcaagtcctttgcctatttgttaaccatactatttatttgctattgagctatgtgagttctttatatactttggatattaactcattattagatatatggttcgcaaatagcttctcccaaaccatagcgtgccttttcattgtgttgattgttggctgtgcagaaacttttagtttccaggatgctcacttgccctatacatttcagctgcctagacccccacattgtgtgaatgtgtgagccaattgtttagaataaactgtatctcatatataatattattcataaataaatactacatggtagtaaatacatatttatgatatataatattacacacacacacacacacacacacacacacacacacacacacacacagagtatcctgtttggtttagtttctccttctctgaggaacccagcccgatacagatacccagctgagctagtgtgtttgctaatcttgacctctggaagccagtgctttaaaccatgagaatgaaaaattgtgaggcactatgtggatgctgggagaagcatgtgagatggaaaagttgttccatggcagccaagaagtgaatgatcctcaaggtgtagcagaggaatttgtaggagagagggatgactgacgtcttcgtacagccctccatccatcccagttagcatggagggattttaggtaggacatacagaaactgggtaatgatggtagttgtggaggaacagaatgtaccactgaatgggggttccgggggaaacatgtgggggaaatatcctcccttgccacatgatctgccaaaactgaacatggggagtttaggaggggcgacatgtcagtttgggaactatctttaggggtgctaacccaaatctccctttctccaactagagcaccctgccttcctcattagatgtcaccgccccccccccccgcccccgacttcatccgccatgtcctgatggtgctttatgacgtataaggccttccttcccacccagggctaccattggctgggtagtggagtgttgaccaatcacagctcaggggcgtgatcgtctcgtcctgggatcgcgagaggggtatacacagggaggccaggcagcctggagttagtcgaccgttgcgagacgttgagctgcggcagatgagtccaaagccgagagcctcgggacctccggccaaggccaaggagacaggaaagaggaagtcctcctctcagccgagccccagtggcccgaagaagaaggtgagtgaccctcccaagctcctcct

SEQ ID NO: 44957 - DNA, 2300 bp, Homo sapien; identical to SEQ ID NO: 44956

SEQ ID NO: 44958 - DNA, 2300 bp, Homo sapien
acccttggttaattattttaacctctatgggtccctattaatttatatgtattccttgtacacaccttcctgtaatcacatttttttctcatgcttttcattatcttgtctactataatgtatgctttctcaaaaataaatggataagtctcactcacagttacatgtctgtgcttaggactgtgtcagtgctaaaaaaaaaaaaacctgaacttatgaataagtcaatgaattaatacattcttggcaaagtccatgactttgtggcctattataaattagtgtgttcaagttgaggttctggtttagtttaggacatagatatctatatatagtccatatatctacatatatatgtctacatccatgtatatcactgatttgggggataagctgtatttataaacaatactatcatgttaatgggtcttcaatatctacacaataatggaaaaaagtatatgtatatttctaaatatctaatgggaacacacacacatatatgtatgtatgtatatacatttttctattattggctatagatatcttttaatagataagtgtatatctatgtaccaatcttgttggcaaaggatgctttcatgcatattatctcatttagtccccacaaggaaaagcaacccacaggaaaggtaataataatgtcagctcaacagagtcacagaacataactgactttatgacaaggcaaaatttgtgaggatagagtcttaacatgaaaccaggtccccagattcatgtccatcatcttccccattattgctcatgttgtccaaaatccttcgcatcatcatggaaggcttcatgcttaggtttacttcctaaagcagaagcaattaggagaatgtcctatgtgttgtggacattatcttttttccttccataaatgaattaatgggcaatgaaataattttaagaaaagctaacttttatagccaggtagaataaaagtaatcaccatgaaatattgtgaagataagcaggccccacacactagctcagctaatcaatatgacaatattacatggagattatctgttccattttacagatgcagaaatggaggcgaatattaaaattcattcctaaggtcacatgcaacttaaacccaagcaatctcattttagaatctgtgttcattgccacaacattctatgatgtactctgatctttgcattgccaatttaaatccaactttcttgaagccaactttaaatactgggaactttaagcattgtcaatttcaagccaactttctccaacccaattttaaatacaggggtcacaccctcctcctcgccccctgcaacttgaaactccctgggaaagataacctcctggacctgggaaatgaggagtatttagaaacaactgcctcttggtaagcacacctcctatattttatccaaatcatgaaattataacaatagaagtaaacaaaaagccttcattcatcctctttcaaccataacctcggcataaaaagctcctgtactttacagagctgtattccaattttcgctgctcttaaaattttttttaatatcattgcttcccaattgactcacaataacgcagacatagggactgctggagactgtgaccttaaacagttaaagatgtctgcatatacgacatcatgtttggtgtggagagtacctagagattcctaaaaaagcaaagaggaagaaggtttgctgtgcgcatctgggtaccctgctctatctccagggttcccaggatctctctgttacagctggtttgcactgggattagttgctctttgcatgaggttgtagctgtggacgtgggttttgtagcgattgggacgactctggagatctattggctgctgggtttgtaaatttcattcattttggtccaatggcagaaggagagcgccggaagcagaaggacctctctcccctagctctctttttcttgcagagacatctttctcccatctctgtctgttagtacagagctcttattcagccactagctcggcctttcctgcttcaattgtaatgcttgttctgcccggggacacactattgacagcagaaacaatgaatttcctccaaacccggcaatgttggtggctcttgcattcctctggatgagcgaatctagttggggggttcccgaaggggaaggcgcctgggctttcaatacatcctcctgaatcatactgcgtttcaggttccttagaaaaatttggatgtgtaaaaagaactcttaacggcgatgcaggtcttccacagctaaggtaggtgcag

SEQ ID NO: 44959 - DNA, 2300 bp, Homo sapien
agataagcaggccccacacactagctcagctaatcaatatgacaatattacatggagattatctgttccattttacagatgcagaaatggaggcgaatattaaaattcattcctaaggtcacatgcaacttaaacccaagcaatctcattttagaatctgtgttcattgccacaacattctatgatgtactctgatctttgcattgccaatttaaatccaactttcttgaagccaactttaaatactgggaactttaagcattgtcaatttcaagccaactttctccaacccaattttaaatacaggggtcacaccctcctcctcgccccctgcaacttgaaactccctgggaaagataacctcctggacctgggaaatgaggagtatttagaaacaactgcctcttggtaagcacacctcctatattttatccaaatcatgaaattataacaatagaagtaaacaaaaagccttcattcatcctctttcaaccataacctcggcataaaaagctcctgtactttacagagctgtattccaattttcgctgctcttaaaattttttttaatatcattgcttcccaattgactcacaataacgcagacatagggactgctggagactgtgaccttaaacagttaaagatgtctgcatatacgacatcatgtttggtgtggagagtacctagagattcctaaaaaagcaaagaggaagaaggtttgctgtgcgcatctgggtaccctgctctatctccagggttcccaggatctctctgttacagctggtttgcactgggattagttgctctttgcatgaggttgtagctgtggacgtgggttttgtagcgattgggacgactctggagatctattggctgctgggtttgtaaatttcattcattttggtccaatggcagaaggagagcgccggaagcagaaggacctctctcccctagctctctttttcttgcagagacatctttctcccatctctgtctgttagtacagagctcttattcagccactagctcggcctttcctgcttcaattgtaatgcttgttctgcccggggacacactattgacagcagaaacaatgaatttcctccaaacccggcaatgttggtggctcttgcattcctctggatgagcgaatctagttggggggttcccgaaggggaaggcgcctgggctttcaatacatcctcctgaatcatactgcgtttcaggttccttagaaaaatttggatgtgtaaaaagaactcttaacggcgatgcaggtcttccacagctaaggtaggtgcagttttaagacgtgtctttcgcatattattatccttattttaaaaagccgtttaaacaatttgacttgcagtggctctccagcaaaggagggaaagcctcactggcgatatttgagcttcatttcatctaatatttatttattttttccttttattattattattattggacaatttgggctggactctctcccatctgtctcgctccatttctttggtgtggatgggaatgtggacatcgatgtatggcttttacatgcaatctctccacaggaacatttggttttattttcacttaaaaataaaaatgcagaccaccaatgttgtttggaagcattttgctgcaatcagctgtttgaacagctctggggccatgtgcggtgtgtttaaaaagtagcgctgccttccatacaaattaaaggaagactgtggcggggaaaggaggggaaaaatatatatatatatacacacagacatatatatgcgtatgtgtgagtttgtgagtgtacacatacacacacacatatatatatgtacacacacacacatacatgcagtacaggggaaaaggagggaaaaggccagggctggagatggcgaaagcaggaggacttctgcaaactgtgagcatggaaggcttttcttctcttttctccccactccaaagccctcgtcttctttaagaaaaccaccactgcctggggtgcttcttttgggaggctggggttgggggttggtgccattaaccagagagaaaaggggaaataaagcttggttggggttgcattatgagatttttttttcccttccttcatctcctggcctcggataagataaggcttgggggatgcacgaaataatccaagtgattgattagacctggcatggcttggttgggctggagaaagatcggggcgcgctggaaaccccgcgtgaagatgaaatgactgtagctccgtgctgctcctccaaactcgggagcggtatccatgcacc

SEQ ID NO: 44960 - DNA, 2300 bp, Homo sapien
gtggacgtgggttttgtagcgattgggacgactctggagatctattggctgctgggtttgtaaatttcattcattttggtccaatggcagaaggagagcgccggaagcagaaggacctctctcccctagctctctttttcttgcagagacatctttctcccatctctgtctgttagtacagagctcttattcagccactagctcggcctttcctgcttcaattgtaatgcttgttctgcccggggacacactattgacagcagaaacaatgaatttcctccaaacccggcaatgttggtggctcttgcattcctctggatgagcgaatctagttggggggttcccgaaggggaaggcgcctgggctttcaatacatcctcctgaatcatactgcgtttcaggttccttagaaaaatttggatgtgtaaaaagaactcttaacggcgatgcaggtcttccacagctaaggtaggtgcagttttaagacgtgtctttcgcatattattatccttattttaaaaagccgtttaaacaatttgacttgcagtggctctccagcaaaggagggaaagcctcactggcgatatttgagcttcatttcatctaatatttatttattttttccttttattattattattattggacaatttgggctggactctctcccatctgtctcgctccatttctttggtgtggatgggaatgtggacatcgatgtatggcttttacatgcaatctctccacaggaacatttggttttattttcacttaaaaataaaaatgcagaccaccaatgttgtttggaagcattttgctgcaatcagctgtttgaacagctctggggccatgtgcggtgtgtttaaaaagtagcgctgccttccatacaaattaaaggaagactgtggcggggaaaggaggggaaaaatatatatatatatacacacagacatatatatgcgtatgtgtgagtttgtgagtgtacacatacacacacacatatatatatgtacacacacacacatacatgcagtacaggggaaaaggagggaaaaggccagggctggagatggcgaaagcaggaggacttctgcaaactgtgagcatggaaggcttttcttctcttttctccccactccaaagccctcgtcttctttaagaaaaccaccactgcctggggtgcttcttttgggaggctggggttgggggttggtgccattaaccagagagaaaaggggaaataaagcttggttggggttgcattatgagatttttttttcccttccttcatctcctggcctcggataagataaggcttgggggatgcacgaaataatccaagtgattgattagacctggcatggcttggttgggctggagaaagatcggggcgcgctggaaaccccgcgtgaagatgaaatgactgtagctccgtgctgctcctccaaactcgggagcggtatccatgcacccctttcccgtgtgtgtgggttacgacgtgggtgggagtggtgaggcaagccgcaaaagtggggtagagctggtggttttgcttcttcggaagcctttgagtgtggcctggaccttagatgggggtgcagggcggtttgccgctgccaccctcggcaccatctctgaactgcccgcttttccggaggagcggaaaagttggaagccgaaaagacaggcgcccggagccctggtctaggtatcaggtgatccggagccctagtcggtgcccactaagaacaccccttctcccatcgggggttcggaggagtgttaagcctgcgggtctgccagtccctaaggtagggatgggggaggggtctgaggaatccgttccaataggcacaccatccccacagccctagaaaaggcaaccaccacccgctccttcctcccgcaccatcccatctcaaggctctctgctgacccgggccgatttcatctggtctcttctcccccgcttcccacctcccaattcccgcgcagctcggctccgttccctcccactcccctaggcggaactgaaagcgaagatcagccaagagcacagtcggaggcggcagagacggtggcgggtgagctaggggctgtgagacgaagcagggagagagtgaacttcagccccgtcccctccccactgccacggctggggcaacccaacccgcgcctgaagcggcttggcttgacctgcggaagcgcgggccgggatggcgtggggagagggaggtaggtgccactgggctgcagatgacgagtgggttgggggcttgctgtgggacaagaggttcagg

SEQ ID NO: 44961 - DNA, 2300 bp, Homo sapien
ctgtgacataagtttacctgtatggcaaacttgcacacctacccctgaagccaaaataaaagttataaaaaaggtgatggtctcacctattctcttggggaaggctccaaaagtaacagctacctctagttaaaaatcttctggttaaaaaaagaagcaaccaaacacgacatcactctttgtttttcttgtctgtctcttaattattcagaaatgggattgctgcatggcagacatccgaatgttgtctacagtacaattcagagttagtagcaaacacctaaatcagccatttgatgagatgctatttgtcactttcaaagttacaatccagattttcagtgcattttcatccaactctgttgaacttttcccaggatgtcatgtactatggaatttccccccagtaggtattattgttctgtgatagatccagttccaatatgttttattaaaaagaaaaagccatgtgatgtattttgttcaattgattacttaaatgaaatggataactattttctgatgcaaatgctctgagtaacccacaaattcctcagaaacacatttgcatactttgagatgaagaacactctaaatgcaccctccttgtgacacctagtgaaacgttttctgtccctagaggatcatttgacatactgtccattgctgcacaacattcttttattgtcacaggagcagcgatttccctagggatagtcatattatccttgtagggaccaattgaggtggtgaccctttaaaagttgactccagtcttaatgggaaagtaactcaaatgtagccttagatttttaaatgggatacagggtgaagaggataccctctcaggcatgcagcagcttactgcaaagtcaggataattgcatcaacacttttagttatgaaagaagtcttcaagagaccagcactgaagcatgtacttgaaatgcaccatcttgtacagttttttttttttttacaagaaactgagattcagaacagtgaagtatgtagcctaaatatatatgtgcacttgagtagaacaaggaaaattcgtgtccaaagtctacactcttttcatttgatgattttccccttgtggcctgataaatatccacatcacaatgacaggatggcctggatgcatgcttctattttgctcctactggaaaacttttagatctgcatgcatatccccttaggaaagagtgaaaattgccttaaacatttgagaaaaagttcttttgataacccgtctggtaaacaatagtgaaattggtaggtgtcattattatcacttgcataacctgtacaattcttgaacgtcggtttgttcattcaacatagatgtgatgagtgttttctaaatgtcaggcattgtttctggtgataggatatacagccaggattaagaaaagtgatggacactaggcatggtgactgacgcgtgttatcccaacactttgaaagtttgattgaggaggatctctttaggccagcctggataacatagagacacctatgtctacaaaaattccaatgaattgcccggacatactggtgcatgcttgtagtcccagctactcgggaggctgaggtgggaggttggctttagcccaggagttggaggctgcagtgagctgtgatagcaccactgccctgcagctttggcaatatggcaagacaccatctgtaaaaaaaaataataataataaagacaagttatgtttttgctattgtcgactatgtggagatggcactatacacattcatatacaaatgaataggaatttcatagagagatgttgtggatttcatggaagagccagccagtgttctaggtgatcattgtgtggcttcattattcttgtctgctttctccctcctttaggttgcattggagttttcgaaagacttatctttctgcaggctcgcctctgagctttgtctccttggagccacctcacttagacagcttcggatgtggatgcagatttgaaccatgttgcgtccccagggactgctatggctccctttgttgttcacctctgtctgtgtcatgttaaactccaatgttcttctgtggataactgctcttgccatcaagttcaccctcattgacagccaagcacagtatccagttgtcaacacaaattatggtaaaatccagggcctaagaacaccattacccagtgagatcttgggtccagtggagcagtacttaggggtcccctatgcctcacccccaactggagagaggcggtttcagccaccagaatccccatcctcctggactggca

SEQ ID NO: 44962 - DNA, 2300 bp, Homo sapien
ctgctttttacacacttctttgtaaatggaaatcacatagaactagattctgataatttgcatccacattttcctgtagataccattatctatctatagtaatctaatggatagaatcatatatcctatagatagaatcataagagttttgtttaagaattgcttccacagatccagcataattctaaagagttacagtgaaacaactgatgccaaccagtttgaagatccccacaaaggaatccaatcggcatgagaacaaagcttcttcatcttcctgtcttgggagttcatcctgcgttctcccaccaatcagtgatgtccacacttgggcccactttgaaatccttgaaaactgtagctccagactcctctgggagatggatttgaggtttcctcccatcttgttttggggggttctctgattaaacctctttctctactgtaccccagtgtctctgcatattcacttgccatacacctgaggcaaagaacctatgacggtggcagatgtatgaatgatcttttaattttcagagtatgcaaaccactgaaaatattagtatcatgaggcaagcaaagatggacagcataggagctcaggggagagagagcgagttaagctaagctgtgcagatctgagctggtatcttctcctctgtgattgttggcaacttggttttgcagtagatcaactcttccatcaatgcctcaagatgttttgtgagttagtttcaatgtctttgtttgctgtgtaataagactgatcattgcaactttctattgagaggaaatgtttggtcattgagagaactgattctgctgcagagacagagacattagatattgaagcttgggaacttattaacatgaggaattattcattctttgtgctggtaatataaataattttttatgcttgggaaatccctactacagattctcttggtcaagtacagctgtggctaaatccaaatacttgatttttcatgtatattattcctgggttctaataatttatgtccctcctatgtctcttctttctttcacacccataaccagtgattgaatttgtagcctgacatttctatttctccatatcactatttaagaagatgaatgaagactttgcacctctggactcatatttttgccttatagccaactcatttttagatttattttgttttatttaagttcagggatacatgtgcagaatgtgcaggtttgttacatagctatacatgccactgtcacatatttttagtttgctgttatgacaaagccccatttttttttagatagattctcattctgttgccagggtgcagtggcatgatctcagcttactgcaacctttgactccccagtttaagtgattatcctgcctcagcctcctgagtagctgggattacaggcttgtgccactatgtccagctaaattttgtattttcagtagagacgggctttcaccatgttggccaggatggtctctatcttccaatctcatgatggccccacctcagcctcccaaagtgctggcattacaggtgtgagtcaccacacatggcccaacaaagccccatttttaaaacagatttattgaagtataattgacatacaaaaactgcacacatttaaagcatataatttgataaattttgataagtatatacaaccaggaaaccatcatcacaatcaagaaacttaacatataaacatcctctaaagagttatcaatacctctcttttgccccacccacctcttcaaaataattcttgcttcaaaaaggcaacttcaacagaaaaggtatcagactgataattaaatcactgtaagtcatgataatgagaaactattcacaagaatagtcaagaagtaaccagaatactaataaaggacattattcctatatttggactaccactaactttagatcggacaacaggccagctttttttttgtggcagaagtagtgcagcgactaccccaaatatttaaaattaaatggaagctacatacagcctaccatccacagagttctggaaaagttgacaggatgaaccaaacactaaaacaactgttgaagaagttttgcaggccgggcgcggtggctcacgcctgtaatcccagcactttgggaggccgaggcgggcggatcacgaggtcaggagatcgagaccatccaggctaaaacggtgaaaccccgtctctactaaaactacaaaaaatagccgggcgtagtggcgggcgcctgtagtcctagctacttgggaggctgaggcaggagaatggcgtg

SEQ ID NO: 44963 - DNA, 2300 bp, Homo sapien
actccaggaaatggagtatttcctttaaccactctcagttctgccattgcctgggctagcaaagtagccttatgcagattatctccaatactgtcacagaccttgatataatcaactaaatgtgctttccctcaaataggtgacagagcagtctggcaatcaggattagcattgttgaaagctagtaactgcaatgctatattctgagaagccgaatctgcaatcacatttttaagagactcctgtaaccaagctataaaatctgcatatgattcttttggtctgtgttttacagcactaaagtaagggtattgttctccacctgaagtgattttttttcccaagttctaatgtgcaatcctttaagatattctatataatcatccttcatgaccacttgtgcatctaaaccggcccagccgcccacccccaaaagttggtctgcagttatattaatttgaggttgggcctgggcattgtgagcagtctgaatgaaagtttaatctgcccactgaggtttaaattgtaagaattaagcaacagttacacaagcttgagtaagagcatcccagtcagtaggaatcagccaactggagacagcaacattccacaacagtcccattacaaaaagagaacctggtccatattgactaataccttgtttaaaatctttgagtacctggtccatattgactaatagcttgtttaaaatctttgagtaattcaaaagggaaaggctcaaatgtagctatactatgttcctgttgatctagggggtgtattctaacagggaactgccaagcctctaaatcctctaaatcaccctctcagctagcttgctgaatttctgcctgaatagaactgagagtggtcactcaaggcactgctcaaacagcaattgagcaactacatttcacccagtgtcctccagaaaaggaagatctggagggtcaggccactctttttcttcaaaataatgaggaggtgcagaagggtagggatgaacctcttcctcctttgctactttagcttcagctggcaaacaaaactgctctgttgcttctgttacttcattatactctccttcctcctcatcattagtgtgaaaaggtttcaaggtggaatgaaccagagcccacccttgtcccattgttacccttgtgtttctgagctccccttcttactcactacagggattgctttaagaatacttgggtgtcctccagcttagtaccacattctcctaccgttactctggtgacccttcaacctgggttcaagtcccatgttgggtgcctcttactgagaccagctcagttgtgcagaccttaactcagtggcactagaggaattaaagaaacacacacagtaatatagggtgtggaatgggaaatcagaggtctcacagccttcagatctgagagccctgaacagagatttacccacatatttattgacagcaagtcactcatagatttactaaaagtattccttatgggaaataaagggatgggccaaaataaagggatgagctctggctacttatctgcagcatgaacatgtccttaaggcacagatcgctcatgctatcgttagtagcttaggaatgcctttaagcaattttccaccctgggtgggccatgtgttccttgttctcaccccagtaaacccacaaccttcagtgtgggtgtcatggccaccatgaacatgtcacagtgctgcagagattttgcttatggccagttttggggccagtttatggccagatttgggggcctgttcccaacacactccttcaggacttggagtatgaaatatgagtgacaccctctccaagcattttctgtggcttttggcccttatacaacttccaagcagttgggtctgccatactaaagtgtgagactccagtccccacctcaatggctgagagttggcagctaagaaaagacagccacattggctgatcacctatccccaaatcaaaatttcagaggttttagtcatgacttcttgacacctacttcctctagtctctctggttaagaactaaacttcttgcattaaattttgtgctgctagccagatgcagtggctcatgcctgtaatcccagcactttggaaggctgaggcgggcaggtcacttgaggtcagaagttgaacaccttcctggccaacatggtgaaacgtcatctctactaaaaataataaaaaaaaaattatccttgcgtggtgacacacacctgtaatcccagctaccaggaagtctgaggcaggagaatcacttgaactgggaggca

SEQ ID NO: 44964 - DNA, 2300 bp, Homo sapien
ggtagccttgctcaggaccacatttcttctcagcaaaacagaagtcaaacaatatttctaccttccaggagaatagaacttaatgtcagattttctcatggatttccacaagttcaagaaagtttcatggtcttcatttatttcttctttagtggtcttagggtcacctagaaatataagctactttgttggaatttggaagataactcatgctccaaaagtacttaaaagatgtgctttttcccctgggaacagatccctaagtcaaggcatcttgcaggggaaacagaatgtaggctgcttttcacctgtcacgtagtaggcctggtatatttatcaagggcagaaaaaaacctcaattacaggcagaattgatgactgagatgcacattgtccttctttatatatctgattttgacataaatttccaggaacttgtgttttccatgccatccctttttcttttttcttttttttttttttttttttttttttgagacagtctcgctttgtcaccctggctggagtgcagtggtgtgatctcggctcactgcaagctccgcctcctgggttcacaaaattctcctgcctcagccttccaagttgctgggactacaggcacccaccaccatgcccagctatttttttgtattttttagtagagatggggtttcactgtgttagccaggatggtctcaatctcctgaccttgtgatccacccgcctcggcctcccagagtgttgggattacaggcgtgagccaccatgcccggcccatcccatccctttttgttatcttctgtctctagtcatggggatattttattttgcaaactagaatgcccacttcttggcaacagacacattttttgctttgtgacacccaccaaccaaacctgaaatataactttaaccttaatcctgattataactgcacatttatgatttttttaaatacaaatacacttgttgttatgatggtagcttttcttcccataaacctatatttcttagtgcagagcaacagctcagcctgtttgggtttggcatggtgtgtccccatgcattgtttttgattctgtaacaaaaaaatattccagttggcttcattttggacaccctcactctctgacttctactctctgcaaatacaattctgcttgaactctctgactggatccagtctatcattagctgccataaatacaacctcaatactcaatctttgttttttcttagctctttatttgttcatttaattgccttatttaaagtttctctatttcttcttttgaaactttccttggtcactgctcacagaaaaaaaaaataaagctctcgactaagaatcctacacctagcatatttatgtatcaaaaattgaggattgcttgagttcaggagttcaagacagacctgggcaacacaatgagacctcatctctgctaaaaataatatatatatatatatattagccaggtgtggtggtgtgcaccagtagtctctcggctacttgggaggctgaggtgagagaattgctcgagctcaggagatctaggctacagtgagctgtgattgtgccactgaactccagcctgagtgagagttaggtcttgtctcaaacaaagaaacaaaacaacaacaacaccaatacagaaccttagggaatctaataaaaaagtagtttgggtcaatctttgctattttaaattcctgttttttccatacattctaatgcaaggtaaatgaaagcactggtgagacccagcctggaggggcttgccctaagcttagtgtttgttatctctgggcaacccctacaaaatttccagagacatctggtgtgtggaataagccaatgtcagcatctcagaaaaggttttcactttaggccttcctgaatcaagagcctaagagtattgggatctaccaggagcatattgtgctctgttaaacattttccatgagtgacctgggcacagggttgtctctaggatgtaggtgcttggttaccagagttctaagttctgttggggtctgtcacaaaggaagtaagatcactttttcaaagtttcatcctctggctccttgctttcctccataaaacccatctaaaatgaccttctgggctactgactgctcactatccctgcgtgtcaactctttagctgtgcacaattatgcaagaacagccctcctcacttccctgaaaagacctgaatgaagccagggtctcaggtttgaggtcatagatctgggtaagaacctagtatttcttattagttctgtgacactagaaa

SEQ ID NO: 44965 - DNA, 2300 bp, Homo sapien
gcacacaagcctggttgacagagcaagactctgcctcaaaaaaaaaataaaataaaataaaataaaataaaataaaaattattggggctgggttcagtggctcatgcctgtaatcctagcacttatagaggcttaggtggaaggatggtttgaggcggggagtttgagaccaccctgggcaacatagtgagacagcatctctgccaaaaaagaaaaaaaaaaaatccatgttgagacatttttgtgtagaaaaagaaaaaaaacaaaaaacaaaaaatacctaggtgtagtggcgtgcacctataatcctagcccttgggaggctgagactggaggattgcttgagctctaggagtttgatgctgcagtgaactaggattatgtccctgtgttccagcctaggaaatagatggagacactatttcaaaaaaaaagaaaagaaaaaaaagctagacacagtggctcatgcctgtgatcccagcattttgggagaccgaggcaggtgtatcacctgaggtcaggagttcgagaatagcctgaccaacatggtgaaactctgtctctcctaaaaatacaaaattagccaggtgtggtggcacatgcctgtaatcccaccttcctgagaggccaacgccggagaatagcttgaacctgggaggcagaggtttcagtaagctgagatcaggccattgcactgcattctgggcaacaagagtgaaactcttactcaaaagaaaaaaaaaaagctttactttttctactgttgcaatggtaataatagaggctttcctctcgaggagctctatacacatacgctgggtgcggtggctcacgcctgtaatcccaacactttgggaggctaacgcaggcagattgcttgaggtcaggagttcaaaaccagcctggccaacatggtgaaaccctgtttctactaaaaatacaaaaattagcccagcatggtggcatgtgcgcctgccgggttcaagcgggaggcatccgcctccccgggttcaagcgattctcccacttcagcctcctgggtagctgggattacaggcacccgccatcatgcccggctaatttttgtatttttatagagacagggtttcactatgttggccaagctgatcttgaactcctgatctcagatgatcggccctcctcaacctcccaaattgctgggattacaggcatgagccaccgcccctgcagagctctcttttctttgcgaaggacaaggcagactggaatggattcacctgagagcggtgcgcatgccctggaaagcattatggttagacccatgtgagacaggttagttttactgcgtgtgttccccatgtgttgttgcccatgtgttgttcccatggtaatcctgctcattagtagagaaatcacaggttcagacatttggtgtatgtccttgtctgaggagccaatggggtaaagctactataagcgggattaggactgaaggactctaagaatcccgcccatgaggaatgataaggcagcgccacggaacctttgttggcctcgggtaggcagtcttctgcagtcccctccggtgtgccgctccgccccgcgctgggcgcatgtcctgccgtgctccggaaaccgggatccggtgcagagaaacccccatcctgggaaacgggctgctgccagaaaggcggtcaccccctgacccatcacataacgtgtttgtggggaacctgatgctaaactattcgcagacgtcctgcttctgggtcagggttttccatggagcagagcagctccctcgctgctatctattgaaagtcagacctccacacaaggctctctgcacccgtgtgcggaggacctggtgatgtggtgtgtgatgtggtgtgtcctgtgtaattcagcccttgacatataccttccttcctttctcctgttcccgagaacctcttccctggcccgctcatgcccacccacccctgagccccggatcacgcagtgggtgtctctcgcgagagctcatcggcgcccgctgtgcattgggaggctcacgtccccaccctcgggctttccaaggtgccgcgccaggggttgctgaggtagaggtggctcccctgctcctccttccacctctccgattccacctcctcctcgcaccccgctgggaactcctccaggggctgagattggattcaccgagcctggtgagaatgactcaggagtggttgtccgagggtgtgcccctgcggttcctgtccgagtagtgttcacgcgtgcccagtggtggccgatggggtcacggcccctctccccac

SEQ ID NO: 44966 - DNA, 2300 bp, Homo sapien
tgtattatatatatgcatatattatttgtatggatgtattcccgttataatatgttattttttttctgctgcttaattctgtatcctctctttgtttctgatgtttggtggtttgattatattaagtcacagggatatgtttattgaaattgaatgtgattgtaagccttcaagattcctatagcagaatatttatattttatttaagtttgaaaaggcttctgttattatttatccaaataagctttctactcttttcttacactttttttttttgagatggaggtttgctcttgtctcgcaggttggagtgcaatggtgtgattgtggctcactgcagcatccacttcctggtttccagtgattctcctgagttccagtgattctcctgactcaggtttctgagtagctgggatcgcagatgtccaccaatacacccggctaatttttgtattataatagataaaccatttcaccatattgtccgggctactctcaagctcctgacaacatatgatccacccgccttggccccgcaaagtgctgaagatacaggcatgggccatcacacccggctctaccacactcttgaatgccagtgtctgacacattggctctttggatgttatcccattaatctcatgaatcttatttatgttttctcctctaactgtatattttgaattgacctccctttgagttttgctgcttgaccacttctattgtcactgctgtcaattgcattttttattttgttgtgttttattcttcaagatttctgtttgttttttcctcccgtattttaatctcttctgtaagcttctctgataaatttcagaattctttgtgttttgctgaagtccactgcattgtcttcaaacaagtattttgaattccttgtcaggccttgtgtccatgcccatctcttttgggtcagtcaccaccagcactttattttgaccacttgatgccgtcatgtttctctcattgatcctaatgcttgtgactatgcatcaatgtctgtgcagtgatgtaggtgcctaatgcagtgtttgtagtttgcctttgtttggaagctttcttccacagtaaggctgtccggagattcagggcaaggaggaggaaattaaggtattttagcctatgatagcttcagccctggtagcacgaggggaaacattaatgagcagactttcatggctggagtaatttgactgacaaagtcgactcagtgccaggttgcacctgtatcacacagttgagcactggatgcactcaaggcctgtaacttccatggtctgccctctgatctttattcagtgtctgaggttactgtagtcaatcagtgggaatattgacgggaactcagctccattctgcggagatcatagtttctaatctgttgccggggttggtctacatgattacccctgggtatcaacctcccaaagtgctggggcaaggggacaggcaaataaatgtcccaaggcaaaatgtactatgcctacctccttcgcccaagtgagcatcccacctccacctcctgaatagttgagactacaggaatgtgccaccatgcctggataacatttttggtgttttcttgttgttattgttgggctcaagtgatctactcacctcagcctgctaaagtgctagggttacaggtatgagtcactacacccagctaaaatttactttctaaaatttaacttttagatcatttctttttattcagtcttatttctcataaatgcagttaagaatgttattgctttagagtttctctttgggtatccctgaaggaataaatggactctcgatattcattttctaaatggtgttagaaaatgaatagttactttagatgagtaaagactatttggcctctttttgttttctggcttcatttcattgtgtatgaagactgtattattttaacccttctgtatatgtgaaatgaatttttactctttcaactgaatgtagtagaagattgtttaaactgattatacagctactacataattttgtttttcttccttgtgcatattagtctaattattgggataacaatgtcaaaattaaattaattttcgtattaaaaacttctgataaaattacctaagtacacacaaacaaaaacatgcccacacaaatcacttaatttctaaaacttttaatttttctgcttctctagtaccttgtattccatcacacagcaaaatctggcagctccacttccagaatttacttgaactccacagcttatttccgatttcctgttatcaccagagtct

SEQ ID NO: 44967 - DNA, 2300 bp, Homo sapien
ttaaggaaggacagaaacagaacaagccttgagatggtgaacaccatcaagaactttgtgaatactttcaatcaattttaaaagcctgtttttgtatcagtcagtggcccatcctttggaataggtgcatccacactgcctctttgtgatttcttctgagctaatgaaaagccttggtttcaaaccccttatatgacatctggacagagtccagatggctgttgtgttactttagttcctacttgaactttgcatcatccagcctccttaattattgtggccatgagacattacttcatcccttgattgatcccaggccaaggtctcaggccaagctgtcacttcagctccttcttggtccagggccaagttccaaggctgagccttgtagcttctacaaatcatcacttcagctccagatgaatccaaggccaagtttcagggccaagccaaataacgcctactccaagaacactaagcacatttctttacttctctgcccttagaaaccgtaaagcacagcctcatagtaggtaaaccactcacatttcacccctcactgtgaagagttttttactttcacttataaaagttttgattcaacctttttgcatccatcctcctgaattttcttggccatgagacaaagaactctgtgtgatacctcacaattagagatttctagatcgtagtgcactaatgagactgcaatgattgaagtctgggaattgagctctgggacgcatcagccttgcgagaccaactgacacactgtccccacactgtgatacacacccttggggtcagtcaaccatatagtggtcaccaatggagtctgaaaaggggcaaggcagatttatacagcctagaaacctgagggacaccatcaagcagccatacatacgcattttggaagttccaaggaagagacaaaaaatcatggatactatttaacaacatagtcataaagaatgcaacaatttaagacaataagtaagcacccaaggagctcaacagactccaagtaacaaaaactcaaagaaacaaactcaaacttacctgataattaaactgtctaaaataaatacaaagagaatcttgaggattttcaagggaagcaggggaagtagctagtcatgtaaaagggaccctaaaaataaccagtggatcgcttatctgaataaccactgaaaagcagtagatttcttatctgaaaactaaaacgatggaaagcagtagcctaatatattgcaagtgatgtcagaaaaaactgtcaagcctaaacattatgatccaccaaactgtccatcaaaggtgagggacaaattatgacattcccatatacaaactggcaccttttacaagtagactaccctttaagaaatgtcttatggagtacttcagggtagaatggacagacactcaaaagcagtatgaacaagcaaagattaaggtaaagataaatacatgaacaaatatgtaagataaaaaatttggccgggcgcagtggctcacgcctgtaatcccagcattttgggaggctgaggtgcgtggatcacgaggtcaggagatcgagacactcctggctaacacggtgaaaccccgtctctactaaaaatacaaaaaaaaattcgccgggccaggtggcaggtgcctgtagtctcagctactcgggaggctgagacaggagaatggcgtgaatccgggaggcggagcttgtagtgagccaagatcgcaccactgcactccaccctcgttgacagggcgagactccatctcaaaacaaaacaaaacagaacaaaacaaaacaaaacaaaacgaacaattaacaatgtgcacctccacaatttgttctccacacaacttaaaacacaaatatatttaataaaaaaactaccactaatttgtgtttttgacataaaatcaataaaggtataattttgagaactcagtaagtgaaataatggaggtacattatacaggagtaaaggctttgtatgttactgaaggtaagctagtgtaactttaaaaatgttataacattagaatgttccatataatcgtcatagcaaccacaattaaacaaagaaacacaaaagagtaacaggcaggaagaaagctttctgtactacaccagagggttggggctgtggatttagctactctcacctgaggctactgagcaagctgtcatgcaccacgagacaaagcccaagctgtcccaccaggcagtaagtgtggagaggttcaggcacatggcatagctgctatttcgcacaattttcactacaccagtggtg

SEQ ID NO: 44968 - DNA, 2300 bp, Homo sapien
ttaaggaaggacagaaacagaacaagccttgagatggtgaacaccatcaagaactttgtgaatactttcaatcaattttaaaagcctgtttttgtatcagtcagtggcccatcctttggaataggtgcatccacactgcctctttgtgatttcttctgagctaatgaaaagccttggtttcaaaccccttatatgacatctggacagagtccagatggctgttgtgttactttagttcctacttgaactttgcatcatccagcctccttaattattgtggccatgagacattacttcatcccttgattgatcccaggccaaggtctcaggccaagctgtcacttcagctccttcttggtccagggccaagttccaaggctgagccttgtagcttctacaaatcatcacttcagctccagatgaatccaaggccaagtttcagggccaagccaaataacgcctactccaagaacactaagcacatttctttacttctctgcccttagaaaccgtaaagcacagcctcatagtaggtaaaccactcacatttcacccctcactgtgaagagttttttactttcacttataaaagttttgattcaacctttttgcatccatcctcctgaattttcttggccatgagacaaagaactctgtgtgatacctcacaattagagatttctagatcgtagtgcactaatgagactgcaatgattgaagtctgggaattgagctctgggacgcatcagccttgcgagaccaactgacacactgtccccacactgtgatacacacccttggggtcagtcaaccatatagtggtcaccaatggagtctgaaaaggggcaaggcagatttatacagcctagaaacctgagggacaccatcaagcagccatacatacgcattttggaagttccaaggaagagacaaaaaatcatggatactatttaacaacatagtcataaagaatgcaacaatttaagacaataagtaagcacccaaggagctcaacagactccaagtaacaaaaactcaaagaaacaaactcaaacttacctgataattaaactgtctaaaataaatacaaagagaatcttgaggattttcaagggaagcaggggaagtagctagtcatgtaaaagggaccctaaaaataaccagtggatcgcttatctgaataaccactgaaaagcagtagatttcttatctgaaaactaaaacgatggaaagcagtagcctaatatattgcaagtgatgtcagaaaaaactgtcaagcctaaacattatgatccaccaaactgtccatcaaaggtgagggacaaattatgacattcccatatacaaactggcaccttttacaagtagactaccctttaagaaatgtcttatggagtacttcagggtagaatggacagacactcaaaagcagtatgaacaagcaaagattaaggtaaagataaatacatgaacaaatatgtaagataaaaaatttggccgggcgcagtggctcacgcctgtaatcccagcattttgggaggctgaggtgcgtggatcacgaggtcaggagatcgagacactcctggctaacacggtgaaaccccgtctctactaaaaatacaaaaaaaaattcgccgggccaggtggcaggtgcctgtagtctcagctactcgggaggctgagacaggagaatggcgtgaatccgggaggcggagcttgtagtgagccaagatcgcaccactgcactccagcctcgttgacagggcgagactccatctcaaaacaaaacaaaacagaacaaaacaaaacaaaacaaaacgaacaattaacaatgtgcacctccacaatttgttctccacacaacttaaaacacaaatatatttaataaaaaaactaccactaatttgtgtttttgacataaaatcaataaaggtataattttgagaactcagtaagtgaaataatggaggtacattatacaggagtaaaggctttgtatgttactgaaggtaagctagtgtaactttaaaaatgttataacattagaatgttccatataatcgtcatagcaaccacaattaaacaaagaaacacaaaagagtaacaggcaggaagaaagctttctgtactacaccagagggttggggctgtggatttagctactctcacctgaggctactgagcaagctgtcatgcaccatgagacaaagcccaagctgtcccaccaggcagtaagtgtggagaggttcaggcacatggcatagctgctatttcgcacaattttcactacaccagtggtg

SEQ ID NO: 44969 - DNA, 2300 bp, Homo sapien; identical to SEQ ID NO: 44966

SEQ ID NO: 44970 - DNA, 2300 bp, Homo sapien
gcacacaagcctggttgacagagcaagactctgcctcaaaaaaaaaataaaataaaataaaataaaataaaataaaaattattggggctgggttcagtggctcatgcctgtaatcctagcacttatagaggcttaggtggaaggatggtttgaggcggggagtttgagaccaccctgggcaacatagtgagacagcatctctgccaaaaaagaaaaaaaaaaaatccatgttgagacatttttgtgtagaaaaagaaaaaaaacaaaaaacaaaaaatacctaggtgtagtggcgtgcacctataatcctagcccttgggaggctgagactggaggattgcttgagctctaggagtttgatgctgcagtgaactaggattatgtccctgtgttccagcctaggaaatagatggagacactatttcaaaaaaaaagaaaagaaaaaaaagctagacacagtggctcatgcctgtgatcccagcattttgggagaccgaggcaggtgtatcacctgaggtcaggagttcgagaatagcctgaccaacatggtgaaactctgtctctcctaaaaatacaaaattagccaggtgtggtggcacatgcctgtaatcccaccttcctgagaggccaacgccggagaatagcttgaacctgggaggcagaggtttcagtaagctgagatcaggccattgcactgcattctgggcaacaagagtgaaactcttactcaaaagaaaaaaaaaaagctttactttttctactgttgcaatggtaataatagaggctttcctctcgaggagctctatacacatacgctgggtgcggtggctcacgcctgtaatcccaacactttgggaggctaacgcaggcagattgcttgaggtcaggagttcaaaaccagcctggccaacatggtgaaaccctgtttctactaaaaatacaaaaattagcccagcatggtggcatgtgcgcctgccgggttcaagcgggaggcatccgcctccccgggttcaagcgattctcccacttcagcctcctgggtagctgggattacaggcacccgccatcatgcccggctaatttttgtatttttatagagacagggtttcactatgttggccaagctgatcttgaactcctgatctcagatgatcggccctcctcaacctcccaaattgctgggattacaggcatgagccaccgcccctgcagagctctcttttctttgcgaaggacaaggcagactggaatggattcacctgagagcggtgcgcatgccctggaaagcattatggttagacccatgtgagacaggttagttttactgcgtgtgttccccatgtgttgttgcccatgtgttgttcccatggtaatcctgctcattagtagagaaatcacaggttcagacatttggtgtatgtccttgtctgaggagccaatggggtaaagctactataagcgggattaggactgaaggactctaagaatcccgcccatgaggaatgataaggcagcgccacggaacctttgttggcctcgggtaggcagtcttctgcagtcccctccggtgtgccgctccgccccgcgctgggcgcatgtcctgccgtgctccggaaaccgggatccggtgcagagaaacccccatcctgggaaacgggctgctgccagaaaggcggtcaccccctgacccatcacataacgtgtttgtggggaacctgatgctaaactattcgcagacgtcctgcttctgggtcagggttttccatggagcagagcagctccctcgctgctatctattgaaagtcagacctccacacaaggctctctgcacccgtgtgcggaggacctggtgatgtggtgtgtgatgtggtgtgtcctgtgtaattcagcccttgacatataccttccttcctttctcctgttcccgagaacctcttccctggcccgctcatgcccacccacccctgagccccggatcacgcagtgggtgtctctcgcgagagctcatcggcgcccgctgtgcattgggaggctcacgtccccaccctcgggctttccaaggtgccgcgccaggggttgctgaggtagaggtggctcccctgctcctccttccacctctccgattccacctcctcctcgcaccccgctgggaactcctccaggggctgagattggattcaccgagcctggtgagaatgactcaggagtggttgtccgagggtgtgccctgcggttcctgtccgagtagtgttcacgcgtgcccagtggtggccgatggggtcacggcccctctccccacc

SEQ ID NO: 44971 - DNA, 2300 bp, Homo sapien
gtagccttgctcaggaccacatttcttctcagcaaaacagaagtcaaacaatatttctaccttccaggagaatagaacttaatgtcagattttctcatggatttccacaagttcaagaaagtttcatggtcttcatttatttcttctttagtggtcttagggtcacctagaaatataagctactttgttggaatttggaagataactcatgctccaaaagtacttaaaagatgtgctttttcccctgggaacagatccctaagtcaaggcatcttgcaggggaaacagaatgtaggctgcttttcacctgtcacgtagtaggcctggtatatttatcaagggcagaaaaaaacctcaattacaggcagaattgatgactgagatgcacattgtccttctttatatatctgattttgacataaatttccaggaacttgtgttttccatgccatccctttttcttttttctttttttttttttttttttttttttttgagacagtctcgctttgtcaccctggctggagtgcagtggtgtgatctcggctcactgcaagctccgcctcctgggttcacaaaattctcctgcctcagccttccaagttgctgggactacaggcacccaccaccatgcccagctatttttttgtattttttagtagagatggggtttcactgtgttagccaggatggtctcaatctcctgaccttgtgatccacccgcctcggcctcccagagtgttgggattacaggcgtgagccaccatgcccggcccatcccatccctttttgttatcttctgtctctagtcatggggatattttattttgcaaactagaatgcccacttcttggcaacagacacattttttgctttgtgacacccaccaaccaaacctgaaatataactttaaccttaatcctgattataactgcacatttatgatttttttaaatacaaatacacttgttgttatgatggtagcttttcttcccataaacctatatttcttagtgcagagcaacagctcagcctgtttgggtttggcatggtgtgtccccatgcattgtttttgattctgtaacaaaaaaatattccagttggcttcattttggacaccctcactctctgacttctactctctgcaaatacaattctgcttgaactctctgactggatccagtctatcattagctgccataaatacaacctcaatactcaatctttgttttttcttagctctttatttgttcatttaattgccttatttaaagtttctctatttcttcttttgaaactttccttggtcactgctcacagaaaaaaaaaataaagctctcgactaagaatcctacacctagcatatttatgtatcaaaaattgaggattgcttgagttcaggagttcaagacagacctgggcaacacaatgagacctcatctctgctaaaaataatatatatatatatatattagccaggtgtggtggtgtgcaccagtagtctctcggctacttgggaggctgaggtgagagaattgctcgagctcaggagatctaggctacagtgagctgtgattgtgccactgaactccagcctgagtgagagttaggtcttgtctcaaacaaagaaacaaaacaacaacaacaccaatacagaaccttagggaatctaataaaaaagtagtttgggtcaatctttgctattttaaattcctgttttttccatacattctaatgcaaggtaaatgaaagcactggtgagacccagcctggaggggcttgccctaagcttagtgtttgttatctctgggcaacccctacaaaatttccagagacatctggtgtgtggaataagccaatgtcagcatctcagaaaaggttttcactttaggccttcctgaatcaagagcctaagagtattgggatctaccaggagcatattgtgctctgttaaacattttccatgagtgacctgggcacagggttgtctctaggatgtaggtgcttggttaccagagttctaagttctgttggggtctgtcacaaaggaagtaagatcactttttcaaagtttcatcctctggctccttgctttcctccataaaacccatctaaaatgaccttctgggctactgactgctcactatccctgcgtgtcaactctttagctgtgcacaattatgcaagaacagccctcctcacttccctgaaaagacctgaatgaagccagggtctcaggtttgaggtcatagatctgggtaagaacctagtatttcttattagttctgtgacactagaaa

SEQ ID NO: 44972 - DNA, 2300 bp, Homo sapien
tcagttcttgataaagcactgcactccagcctggagaacagaggcagaccatgtctcaataaacacacaaacaacaaagacaagaaatttaaaaaacaaactattatatttggcaaaaagggaagctaattattttaaatatagtacatttggtagactgttggggatgaaagcctgactggtaaaggtaagtagaattttcaaatgagagtgtaatatcaatggtaaaaatattcacctgaaattcaaggtaaaattttaaatttagcaattagggtgtcactgatgacctttgagaaaggactatgacttcactgttgtgggataaaacttgaggcagaataagaactgatggaaaggaaatagctaatagaaattctctgtgcaaattaaagcagagaaaaaggtcagtaccaaaagagacagtttttttttgttgtggatcataaaatatggagttttttatacatgtgtgataaggaaatcagggcagtgaagaagagaataaaattaattatgcaaaagaggaaaatatcaatcatattgatgagttgggtccaggaggatgtattttaaaatgtgataaatgttttgtctttgaataaataagtgcatatagataaaggtgtgattaggatcagaataatgaacaacagaagttgaggaatttaatactctgcagcataaaacttagcaaattggaggaaagcatatttatgataagttatgagaataaaagcaatgcaaagaaagttcaggaaataaacatcttatcaaataaaaataaaatagtaacttcttgattcttcccttccacttacttaaactactgcttctatttttcccattgttatattttaacaaaagaccaatgtcttctgggaaaatattatgttttctctctggtaatttgcattagattcttacacctttcatgcctttttattatattaacaacctttttagtcagaaaaaggtttctgttccaatatttacttgagttaaaagtcctgttgccttttctcttccttcttattcatttttgtttaatattgcttcccacacataatgactaattgaccttgacagtatatcagtaatttctctggcagtttgtctgcaaagaacctaataagagctatttcaccccacccctacccccccccaacaaaatagaatttggatcttctataaccattcaaatctggatttcatatctatttaaattgaaacttttcttgattaataacttcattaataacttgattaataacttcataactttacttgattaataacttcataacttctgcattaaatcaagccaagaatcagtattttaaatgaaaaatggccaacaactaacaataagtggtacttaaagggctcactattttctattcctctctcaatcagaaatacctgttagatacttttctcagtgtcatcatggttagatttggcttagacattgtgcccttttgttttagttgatgtcagcaggagacactggctgaaggtcacaaaaaggaaacttaggagaaatgtgcaccttttttcttactacttgaagacaggactatcatcttggtattaaggggtagtcaatgcctcatacaagttttattgtctatttcctttaaacaatatgtactgaagaaatagtacgtcaagttactggacatattgactgaattatgtcaaatgctttaattgactaaattatgtcaagtcatggtttaatatttcttaaacaagacatagatttttaagttgtgattagtgagccgtatttacttttttatattttccatgaacagtgaattatacagaatctggttttcttctgtttggatttgatactgagctatactggattcactgacaagaagagtttgaattagcagcatgctgagaatggacacagtgtttgaagagactgataaagaaagtacaggaggagttttatttttggaagaagaaatggtccttgggcacagaccccatatgagttttcctttcagcgttctctgctcagctgttctctgctgtggtgaggcgcctatgctttgtatatgtctgaaattaattgaaaagctagtgacagattctgatgtcatttgccatgagctttattgttgtgcaggtaattttggatcaaatcaccctaacgtttttcaacaaagactttagaagaaataaagctgcattactttttcttggcgcattcttcctttaggacctatagtgaggtaagtgacacaaatatctctcattctctgtttccaaacagtaaatag

SEQ ID NO: 44973 - DNA, 2300 bp, Homo sapien
agaaataggaagatatcgtggctcacactggtgaccttagcaatttgtaagtccaaggtgggtggatcacttcaagcctataatttcgggccagcctgaacaacatagcaagattctgtctctaaaaaaattaaaataattcattaaattgaataattatctgagcctactaggcgtttcctgcagaaccagctaattgggaggctgaagcggcaagaacatgggtagcacaggctgtcactaagaagatcagacagacatcttattcttttttatagctaagtggatacagcctactgaacatttatgtttttcatataaaatttcttattttcttgcttttttatgactaaaagtaggcttccagtttggagtcaggggacacctttagctgagccatctccccctgaacacaccaaggcattcttcctccctaaactgtcacctatcttagctccccaaaatgctcagccacaatttgtcttagattatcctacatttaatgtgattttgtcttctgattctcctattaactccctctttcctccacacccatgtcctatcttttgctgctctcagtaatcattcatcctctcgcatcacaaaagaagtctgtactcccttcagctagagcaacatgaaaattcctgagaagaacaaaaaaaaaaaaaattttaattttgcacttttttaattttaaaaaactgtcaaaattgagaaaccacatgcatctggtaggggcacctgtttcatcttcacagagtttactgatttgaacatttttgttacataatgttaatacagaaaattctgaattaaacaggcacacacacaaaaaaacaaaacctaaactatattaaaccaaggcaattttctaacaatgactcctctttccagtatgagagaactgcctcctacagtatgagaaatatcaatactatatttctttcttccacacatattcaacacttaccaatgctaaggagttcgaattttaatataccaactgtcaaccatgaacatataaaaattctgactgtaaatgatccatggttattttactcaatactaaaattatttcacaaattcaagtcctgttttataatgataccattatttgcatggcacaaagattattccttacaaaatctattctttaatagagatttggttcttggagccaaattaaaaaaaaatatgctgcttagacacacatacatatttacttttcttaaaacattttctcaatatttttatttttattatttttttaatctcccactctttgggatccccttacaagtaagtcacccgcttttaaaatctctttcatctttaacatttgtcagatatttagagacataccaaattaaatcattatatattcttctgatatgactgaaacatgttttgaagagatatgcataaatataacgtttcattctgaaatataatcagttagttttattcatctttgtcttcaccttaacttttgaaggtaagtttcaaataacataaaattacatttgagtgtataattgaatggaattaaatatgtttataatgtcatacgatcatcatctatcaatagttcctaaatatttctattgcccaaccagaaactccatatctattatacagttctttttattgtccagcccctgacaacccgtaacctaccttttatctctatggccatgtctttttaccacacaggtttagcattgcatcagttttcaatccaacatgccaaactagttttaaaatcattcatatttctttttctttcctttattttattttatttttttgcattttgcaattactaggccttgtgctcctcacaccaatctagttataatgagtgtgtcaggaagaacattggatttatttcagggattgaggacattatttccttatttatttaaataatgatgcaggcaagagatttttgcagcttacattgtgtaagtgagcagtctatattttattttcactggatacatttctcagattgggaaggaaaccctttgggctagaattttgttggttgctaggagaccaaagtccccttgtgatgtcattgttactcagtttgggaaccattgtgatggtctagataagtgtacatgcttaggccttctgaagcagcatttgaagctgcagtcctgaaaaccatgcaggccggaagagtagataaagaaatatttatttgagatggcacatgtttcttcagaaactcaagatgtttcccccaaagatgaattaactgcttcagaagcctccactaggtctccatt

SEQ ID NO: 44974 - DNA, 2300 bp, Homo sapien
aaaaattgataaaagttgtataacagtaaattagccattgcggaaataatttttcaagcaaattatacaaaaaactcatatgtgaaaaatggcactaaaaacttactgaaatgccacttctgcatgccagaactcactgccatcattcaaggtgtttgtgaacaaacttaacttatatctggggaccctgcccccaatatttcaacataggttctttttatatttctaagtgttggccagcctgagaaataaagagaaagagtacaaagagaggaattttacagctggcccactggggataacatcacatacaggtaggaccctgatgcccacctgagccacaaaaccagcaggtttttctaaggacttcacaaggggaggcgggtgtacaaacagagagtaggtcccaaagatcacactcttcaaaaagcaataggagaacaaagatcacattcttctgaggccaataaagaccacaaggcaaagggcaaagcaagattacaaggcaaaaggaaaaattagaattactgatgagggtctatgttcagctgtgcacttattgtcttgataaacatcttaaacaacagaaaacagggtttaagagcagagaaatggtctgacctcaaattcaccagggtggggtttttccccaccctagtgagcctgaggttgctgcaggagaccagggcgtatttcagtcctcatctcaaccgcatgagacagacactcccagagtggccatttatagacctccccccaggaatgcaattattttcccagaggatcaattatcaatattccttgctagtaaaagaatttagtgatatctgtcatacctgcacatttatagtccatttataggctctctgcaagaagaaaaatatggctctttttgcccaagcccacaggcagtcagtctttatggttgtcttcccttgttctctaaaactgctgttatttggttcgttttcaaggtgcactgatttcatcgttttcaaacacatatgttacaatcaatttatacagtagtggtcctgaggtgacatgcattctcagcttacgaagaaaacaggattaagagactaaagtaagacagctgtaaggaattataagagtactattagggaactgataaatgtcgatgaaatcttcacaatttatgttcttctgtcgcagctccagccagtccctccattcagggtccctgaattcccgaaacaaacttatgctcaaaacaacccagggcaagggcctacccagcccccagggatctaaaaaataaaagctatgccttgtaaaaacttacttgtaaacttcacaaaactgtcccatgtcaggtgctattgttttatactagcacttatttacaccttttcaacataggttaaggttttccaatgaggactgaaaaggcaaaaaagtagttaaaatactgtttaaaaacattatccccaggtttaaactgcctctaactttgaagtcaaacaagagtttagcaattatagttgaaataatttaaaatctagcaaagttgcataaaataaaatgaaagttacacacagcctaccaacaacaaagttaaaaaaaaagaaaaccaaatgcataaacaaatcactgaagcacttaccaaaagaaattatcacaaaaatcaactataataaaatcaaatcctgcccatggtgttcatccgagtcaggtgcacccccactaaacaaactaggtattcaccctataaaatttttttcaatcagccacaccaaatcttaggtcaaattaaaagtaatctctgcaaactaaggaaattaatcttcaaaaagcaaatgcaggttttaaaaatagccatgtgaagtattcagcgtcaggtacattaagaaatgcgtattagcccgacaggcccagcatgcttctttaaacctaactactctctttgggttaaaaaatgaaacccaacttctctagaacccataagggatgggtcccattttgtaatcttatccactcccactgctgttaaaattgcaggaatcatgccttaatcgatccatcatggtttgctgaaacaggcagctaatcatgcaacaagacagagttgtcactgagaacaacagccctgctctggtccctccaaaagccgacgaatccacacaagactaaagatgaagaagaggacaacaagcccagctctaatcacactccagaagataactagtctacgcacagccaaaacttaaaaactcatcaggcaagttaaatataattaaaaatcttaaatctaattttcactgtaatactaattattt

SEQ ID NO: 44975 - DNA, 2300 bp, Homo sapien; identical to SEQ ID NO: 44974

SEQ ID NO: 44976 - DNA, 2300 bp, Homo sapien
gaaataggaagatatcgtggctcacactggtgaccttagcaatttgtaagtccaaggtgggtggatcacttcaagcctataatttcgggccagcctgaacaacatagcaagattctgtctctaaaaaaattaaaataattcattaaattgaataattatctgagcctactaggcgtttcctgcagaaccagctaattgggaggctgaagcggcaagaacatgggtagcacaggctgtcactaagaagatcagacagacatcttattcttttttatagctaagtggatacagcctactgaacatttatgtttttcatataaaatttcttattttcttgcttttttatgactaaaagtaggcttccagtttggagtcaggggacacctttagctgagccatctccccctgaacacaccaaggcattcttcctccctaaactgtcacctatcttagctccccaaaatgctcagccacaatttgtcttagattatcctacatttaatgtgattttgtcttctgattctcctattaactccctctttcctccacacccatgtcctatcttttgctgctctcagtaatcattcatcctctcgcatcacaaaagaagtctgtactcccttcagctagagcaacatgaaaattcctgagaagaacaaaaaaaaaaaaaattttaattttgcacttttttaattttaaaaaactgtcaaaattgagaaaccacatgcatctggtaggggcacctgtttcatcttcacagagtttactgatttgaacatttttgttacataatgttaatacagaaaattctgaattaaacaggcacacacacaaaaaaacaaaacctaaactatattaaaccaaggcaattttctaacaatgactcctctttccagtatgagagaactgcctcctacagtatgagaaatatcaatactatatttctttcttccacacatattcaacacttaccaatgctaaggagttcgaattttaatataccaactgtcaaccatgaacatataaaaattctgactgtaaatgatccatggttattttactcaatactaaaattatttcacaaattcaagtcctgttttataatgataccattatttgcatggcacaaagattattccttacaaaatctattctttaatagagatttggttcttggagccaaattaaaaaaaaaatatgctgcttagacacacatacatatttacttttcttaaaacattttctcaatatttttatttttattatttttttaatctcccactctttgggatccccttacaagtaagtcacccgcttttaaaatctctttcatctttaacatttgtcagatatttagagacataccaaattaaatcattatatattcttctgatatgactgaaacatgttttgaagagatatgcataaatataacgtttcattctgaaatataatcagttagttttattcatctttgtcttcaccttaacttttgaaggtaagtttcaaataacataaaattacatttgagtgtataattgaatggaattaaatatgtttataatgtcatacgatcatcatctatcaatagttcctaaatatttctattgcccaaccagaaactccatatctattatacagttctttttattgtccagcccctgacaacccgtaacctaccttttatctctatggccatgtctttttaccacacaggtttagcattgcatcagttttcaatccaacatgccaaactagttttaaaatcattcatatttctttttctttcctttattttattttatttttttgcattttgcaattactaggccttgtgctcctcacaccaatctagttataatgagtgtgtcaggaagaacattggatttatttcagggattgaggacattatttccttatttatttaaataatgatgcaggcaagagatttttgcagcttacattgtgtaagtgagcagtctatattttattttcactggatacatttctcagattgggaaggaaaccctttgggctagaattttgttggttgctaggagaccaaagtccccttgtgatgtcattgttactcagtttgggaaccattgtgatggtctagataagtgtacatgcttaggccttctgaagcagcatttgaagctgcagtcctgaaaaccatgcaggccggaagagtagataaagaaatatttatttgagatggcacatgtttcttcagaaactcaagatgtttcccccaaagatgaattaactgcttcagaagcctccactaggtctccatt

SEQ ID NO: 44977 - DNA, 2300 bp, Homo sapien
tcagttcttgataaagcactgcactccagcctggagaacagaggcagaccatgtctcaataaacacacaaacaacaaagacaagaaatttaaaaaacaaactattatatttggcaaaaagggaagctaattattttaaatatagtacatttggtagactgttggggatgaaagcctgactggtaaaggtaagtagaattttcaaatgagagtgtaatatcaatggtaaaaatattcacctgaaattcaaggtaaaattttaaatttagcaattagggtgtcactgatgacctttgagaaaggactatgacttcactgttgtgggataaaacttgaggcagaataagaactgatggaaaggaaatagctaatagaaattctctgtgcaaattaaagcagagaaaaaggtcagtaccaaaagagacagtttttttttgttgtggatcataaaatatggagttttttatacatgtgtgataaggaaatcagggcagtgaagaagagaataaaattaattatgcaaaagaggaaaatatcaatcatattgatgagttgggtccaggaggatgtattttaaaatgtgataaatgttttgtctttgaataaataagtgcatatagataaaggtgtgattaggatcagaataatgaacaacagaagttgaggaatttaatactctgcagcataaaacttagcaaattggaggaaagcatatttatgataagttatgagaataaaagcaatgcaaagaaagttcaggaaataaacatcttatcaaataaaaataaaatagtaacttcttgattcttcccttccacttacttaaactactgcttctatttttcccattgttatattttaacaaaagaccaatgtcttctgggaaaatattatgttttctctctggtaatttgcattagattcttacacctttcatgcctttttattatattaacaacctttttagtcagaaaaaggtttctgttccaatatttacttgagttaaaagtcctgttgccttttctcttccttcttattcatttttgtttaatattgcttcccacacataatgactaattgaccttgacagtatatcagtaatttctctggcagtttgtctgcaaagaacctaataagagctatttcaccccacccctacccccccccaacaaaatagaatttggatcttctataaccattcaaatctggatttcatatctatttaaattgaaacttttcttgattaataacttcattaataacttgattaataacttcataactttacttgattaataacttcataacttctgcattaaatcaagccaagaatcagtattttaaatgaaaaatggccaacaactaacaataagtggtacttaaagggctcactattttctattcctctctcaatcagaaatacctgttagatacttttctcagtgtcatcatggttagatttggcttagacattgtgcccttttgttttagttgatgtcagcaggagacactggctgaaggtcacaaaaaggaaacttaggagaaatgtgcaccttttttcttactacttgaagacaggactatcatcttggtattaaggggtagtcaatgcctcatacaagttttattgtctatttcctttaaacaatatgtactgaagaaatagtacgtcaagttactggacatattgactgaattatgtcaaatgctttaattgactaaattatgtcaagtcatggtttaatatttcttaaacaagacatagatttttaagttgtgattagtgagccgtatttacttttttatattttccatgaacagtgaattatacagaatctggttttcttctgtttggatttgatactgagctatactggattcactgacaagaagagtttgaattagcagcatgctgagaatggacacagtgtttgaagagactgataaagaaagtacaggaggagttttatttttggaagaagaaatggtccttgggcacagaccccatatgagttttcctttcagcgttctctgctcagctgttctctgctgtggtgaggcgcctatgctttgtatatgtctgaaattaattgaaaagctagtgacagattctgatgtcatttgccatgagctttattattgtgcaggtaattttggatcaaatcaccctaacgtttttcaacaaagactttagaagaaataaagctgcattactttttcttggcgcattcttcctttaggacctatagtgaggtaagtgacacaaatatctctcattctctgtttccaaacagtaaatag

SEQ ID NO: 44978 - DNA, 2300 bp, Homo sapien
cagctgctggcccaggtgctaagcccctcactgcctggggcttgcgggtgggcctgacgctgccagggcagggccagcagagcccacgcccacccagaactcctgctggcccgcaagcgccatgcggcagcccgggttcccgcccacgcctctccctccacacctcccaggaagctgagggagctggctcccgccatggccagcctagaaaggggctcccacagggcagcggcgggctgaaggactcaagcgcggccaaggaggcgcggagagccatcaagggctgcgagggctgccagcacactgtcacctctcaagctgagatgagagatacaaatttagaaatgagaaaggaagacttcacaatatacagactgggctctaaaaaaatgatgatgaacatgtgtagcaaggtgagaaataaaataaaagcaaaaatcaaggatgtgctatttttactatggatcttcttatttctgtatcttcttattttttaggatatccccccagatatgctgaaaaagtgaagatatacagccatcctcaatagaagccagtcatgatcacatacctaagtggggttgaatgcacacagaaatctattaatttcagactcttcctctatttgggggcatctctactagctaggatgctgccatagcacttgaattttaattttcaatatcaaacctaagattacttcactcctgctggatattactttgtctatttaaacaattttttgtctttgtttcctttcttcctctctcccaccttccttctttcctttctttttcccaccctcccttcttctttccttcttctcgctctcccttggcgatgtgaattttgttctggcatacattgaatgactcgtctgccacaaagttgaattctaatacacaatggtgtttggtttcgcatagtgtaatcacaattttgtgcattttaaaattaccttagacaacactcagatttgcaagagcaaaggaaatcattaacaaatgaactatcaacgattgccaaaattctttccatattggctgcctatacttgggtcttctgcagccagagtttgctctgtttcctcttttggaagctagaaaaattaaaaattgttgttctatgtttaaaaactatagaaatgctgttctccaaagagaaaatactggagcagaacaggtatatattctgtgaactttgttttccaaaaagtctggttgagtatttaaggtccagctacctaccaagaaatatgccaaggtctgcgaagtgtagaatgccaaacaatggcatttgtttcatcaattcaatccatgtgtttcatcaattcatgcattttttttcccttaaataataagtcaattttatccttttgattcaaccagcacagcttaggggatgacacatgcatacagtagactgtcagagtggtatactttgtataatagaaataaatgaagataaaatagaaaggaaaaaaagcagatgatttgctaggaactctgcctgacctgtagtccctcagcacataacattgtctctggggaagaaaagtttatcttgggctgcaaacagacaataaatggtaagaagcctcaagttctgagacttggataaccacagtaagtatcccttatggtagggcagtgcagagctcagctttctaagatggagatttctaacgaagagacacatttccctatgtaatgagaaagttgggcttagaggattttttattttgcttatttattgtgtgcatgaaaatttttgctctcaagttcatttttgtcagatattgacaaaattcagactgcataaagtttaaaaaggtatctacagcaatttttttaaaagcatagttgaaaatctcttatcttctccctactccatttaattcatcaacctagaagatgtggttaaagccctcttcttaacagtttagaagtgttgtgttaccatagacttttgtttgagtaatgtaaaataactcgtggatagtctgacactttgcaagaaagcatgtaactctgttgttcagatataacaccaggaggccttgggattatctacctatcagtgctgagatggagaaagagtcaaaagcaacccttcttgctccaggcatgtgcaggaggttttttggtttcagcattttgttgcatgctgactatgtcctttaccttctcttaaattatgtatcaattcatgctggtttattcacttcctgatgtctatatgaagaggctgtctgccaacatctttcatcactctgcctgcaactatgaaaaatttagttc

SEQ ID NO: 44979 - DNA, 2300 bp, Homo sapien
ctgcggatatctttcacagtctctttaaagccatgtgaatttgctttaacattgaacgtactttcacagagcttgtaaggtggtagtgaggaggaagtatctttttgcttgtgtgttttctgtgggcaggtatgcttggggaggtctaagctcctgctgctgctctctagcttcagggcttggatgggaggcactgtgtgcatggtgttctccaaaccatgtgtgtcagatgtgatccttgtcctgggtcttctaaggaccaatattttggagagtaattttggatcttcagtcatgaactttatcttttcctctgattttagaaacatctcattctgtgtttgaagtcactttctgctacatggtctaagatggcatctgtttcctgtactgaaatgtgactgatacaccttaaattgaaagagtttttcaccctcaccaatagaccaggttggtggtacaagggcagctttgtcatccctcatatgtaagtttgcaggctgggtcccagtaactgccccacctccacagtggcccacaggggaggggaagcaagggcccagtaagtaattggacccaaaggaacacatgtcccttcttatcttctgctggccataatcagtcacctgatcctaaacagctgcaaagaaggtttaggagttcattctttaggtgggaagccacccacccatctaaagctccaaatttgtatttttcataggaaatgagaagaaacgtggatggtctctgctgagccattgcttcattttcgttgagtgtctgattcacccgtgcttctgctgagtggagtgcactaaaccatttggggagttctcagaggattgtgctgccctgagaacaggatgccccttagaattgctgttaaaattactagttttattagcatcaattattattactattttttcagatggagtctcactctgtcactaggctggagtgcagtggcatgatcttaactcactgcaacctccacttcccaggttcaatgattctcctgcctcagcctcccaaatagctgggactacaggcgtgcaccaccatgcccagttaatttttgtatttttagtagggacagggtttcaccatgttggccaggatggtcttgatctcttcacctggtgatatgccggcctcagcctcccaaagtgctgggattacaggcataagctaccatgccctgacttgcatcaattatttcacatgcattcttgaacgagctctaagcagtttacaaacctttatgttaatgactcacatacattaaaatagaaaataaatgaaatatcaacagaaaaatagtatgtcttctagaaatgaaagaagacttatcagttttagatgactgactcttctgtttacagatttttaaaaaatattttaagttctggggtagatgtgcagaacgtgcatgtttgttacataggtattcatgtgccgtggtggtttgctgcactcatcaacccgtcatctacattaggtatttttcctaatgctatccctcccctacccccgcacccccaaacagtgcctggtgtgtgatgttctcctccgtgtgtctatgtgttctcattgttcaactcccacttatgagtgagaacatgaggtgtttggttttccgttcttgccttagtttgctgagaatgatggtttccagtgtcgtctatgtccctgcaaaggacatgaactcatcctttttttatggctgcatagaattctgtgttgcgggtgggggcttcagggccgcggagggggtccccttagggtgggccgtctcctcctcgcccgccgcaggcaggagcgcgggggaccgaaaccgtgtagtttgcagcgtcaggcagcgggtccgcgcccagcgagcggctccccagctcctgggaggatgcggacccgggacgcccccgtgagctcactgcgcctggctgacacgaggcgctcacagaacaaagcaagggcttcggggagggcgcggccgcggggccgagcgcgcagatcgctccggaccgggacaccgcctgcgaggagcgccgaccagccgggaagggttcgcgctaggcggcgcccgggtcccgtcggccagggtctcgccggctcgccgcgctccccaccttgcctgcgcccgcccggagccagcggttctccaagcacccagcatcctgctagacgcgccgcgcaccgacgtaggggacatgggcagagcaatggtggccaggcttgggctggggctgctgctgctggcactgctcctacccacgcagatttattccagtgaaacaaca

SEQ ID NO: 44980 - DNA, 2300 bp, Homo sapien
cttacccacctctccctcccgagttcaaggaattctcctgcctcagcctcccgagtggctgggattacaggtgcccacaactacgcctgggtaattttgtatctttaatagagacagggtttcaccatgttggccaggctggtctggaactcctaacctctggtgatctgcccacctcagtatcccaaacacttctctccaaagtgttggaattacaggccagagacactgtgcacggcctagggtcaaacatttaaaggaaactgaggcagattaactaatgaactaccaagacaccaattaagaattcagttggtctgggcacagaggctcatgcctataatcccagcactttgggaggccaaggcggatcactggagcccaggattttcagaccagcctgagcaacctagaacttcatttctacaaataattaattagccgggagtggtgacacaaaactgtggtctcacctgcttaggaggctagggcaggaggatcacttgagcctggtaagtgcagtggcgtgatcacagctcagtgtagccacaacttcccaggctcaagcaatgcatcctcacgtggtcatccctctgtgggtgtctgtgcccttttatttttttagagacagagtcttgccgtggcccaggaaagagtgcactggtgcaatcatggcttactgcagctttgacctcctggactcaaccaatcctcccatctcagcctcctgagtggctgggaccacaggtgtgcgccaccatacccagcatatatatatatgaaaacagagcaagacaaggtcttgctctgttggccaggctgaagtgcagtggtgcagtcatagctcactagagtctcaacctccaaggctcagtgattctcctacctcagcctcccaagtagctgggaccacaagtgtgcacaatcacacccatctatatatatatacacacacaaacacacacatatatacacacacatataaacacacacatatacacacacatacacatatatatttttaaatacacacacacacacacatacatatttctatacatggagtccaggctggtctcaaattcctggcctcaagcgatcctctcgtcttagcttcccaagtagttgggactagcagcacacaccatcatatctacataattttttaaacttttgtagagatggagtcttgctgttttgcccaggctggtctcaaactcttggcttcaatacagcctctcgcctgggcctcccaaagtgcagggattacagcacccagacccagctggacgtttgtttgtagaactatgaaaaatatggctgaattagaaattgggtggtgccaagtgaacttcacccaatgcttctgtcaccgcatcagttctctctacccttttcgcgtgttggagaactaacttgcaaggcaggggacgcggctccagggcgctttgcctccctcaggcggctcaggctctcagtgcgcgagacccagggaatctggagccaacgctacaacccgcccaagggccgttcccgctcacggtggagctagcgtctctgcgcgggagaggggttgcgcggccagtgcccacccggagcaaccgctccgaagcccaggtcccctcccctcgacgccgacccactgctctccttgcccagtgacgccccagggcagcacagtccggagccaggccttctggggaccggggcgcacgtggcccgagctgtccttgagcaggggcacggaccgacactcgccgcatgggcgcgcggggcagacgttttgcctcccagcgcttcaataccagatgttcaaaaccagatgtttccagaccatatccccgtcgcttccgacacttggaaagaccaattgccaggccccagaaggcaagacgtttgcgaaggaaaccgccaatccggttgctcgctacttccagggtcgtgtgctcccttacgcaggaccctgcccaatcgtcaatgcgacgtcctcctactcccacctcagagctgtcacagagactgtcagttccgtccctccccttcagccctttaacgcacgtcttcccgaccgcataacttgctcagtccctgcggccaactggggcgggccaatggctgtgacggataaggggtgtggggtgcggggacaatgggccagagcttctcatgcagcctgcaccagcgccgggtcggagagtcagaggccaccctgagatggaccgagatcttcagttggggaggcgcctccggtgagcttgcggccagatgccccctcagtagtcctccgcaacaggtgccgc

SEQ ID NO: 44981 - DNA, 2300 bp, Homo sapien
cccatgttggctgctggctgggcctcaatgccaccagaaccccaggatcaccaggactttcctcagaaggtccaggtagccctgggaatgccatcctggaggttttgaaaaacatgggaggggcaagggcttttgtgcgtttacgcctgaggtgtggtatctcatacaatagccccttcttcacccctgttccccacctcccaccagccccaggcctgaaggagctcagaagtcccttttgttgttgttgtttgcaatggagtctcactctgttgcccaggctggagtgcagtggcccaatcttggctcactgcatcctccacaacctgtgttcaagcgattctcctgcctcagcctccgaagtagctgggattgcaggcacctgccatgatgcccagctgatacttgtatttttagtagagagggggttttgccatgttggctaggctagtcttgaactcctcacctcaggtgattccccccacttcagcctcccaaagtgctgggattataggcttaagccaccgtgcctgcccaaaaggtcctttattaggcctcagtgcaattctcatgtgtgcatgagtgcgttgaggaccacacatggggcaggtgagctcttttctctgcaagaggggaccctcctgcatcagggcttcttgtgcctgctgttatgtctcagccctgctagggatctagtcagaatggcaggaggccaagtttggctaccactcatactgacttttttcttcagtgtttttggccagaattcccgattccctctggaaagtctgttctttgctgaggcacaggtagctgagccatgagaagacgttctggtcagagtgactggcctcttttgtcagtccctgaggtggacaaattgccctggtctacagctatctagactgcttttggcagttgtccccagtacattctgccaagggattgtatgaatttttgtcgagtgagagtcgttgtgggttttaataatcgagctgttctcccttggttattttttagcaccctgtcaccccaaccagcatcgcctgctcactcctggcgattagattcggcggcaagtctgtccgaagatctttaacctagcagaaaacataactagtgatctcaaagatgatgggggggaatgattaatgtacatcgacacagggcagatagagcttttaggtcgtacttgtcatattgatttgcatggatacagagttttgctaatgttgaaaacctgaagctaaactatattttcattgtttatgtgcaactagaggaactgctaggtaaagagtttcagatcagggctccagattggggtgccaggagcagggcatgtgagatcaccaagagattcagaggcctccactttattttatttatttatttatttatttatttatttatttatttatttatttatttattattttgagacagagtctcgctctgttgccaggctggagtgcagtggtgccatcttggcatactacaacctccgcctcccgggtgcaagcaattttcctgcctgtatcctgagtagctggggctacaggctcgcaccaccacacccaaccaatttttctatttttagtagagacggggtttcaccgtgttggccaggatggtctggatctcttgacctcgtaatccacgagcctcggcttcccaaagtgttgggattacaggtgtgatccaccgcgtccggccccggggtcacaacttcgaggtgttgtttgtccttgtgatttcagaatgtggggaggagtaccattttaggtgggggaaggttatgaaaaggcactattgctttgaagaaaggagggtcttttaatgctaatagtaactgccacaggggtagatttatagggccagtaggggtcgctccgtaccatttctggcaccttcctccaacaccaatttctgttcttcagagctctagctatcatgacaggaatacaatagacttttatcgcaagagttttttactttttactttttattttttttaggcagcctccttctgccttgctccctctccttcccccttccggaagctatagacacttccgagagagcgcgaacttgcggtgcactttgcatgcgcgccgcgggtaggactggacggtcggatttgtaggcaattctgacaccgagctcccgggctcggttggtagaagatcgctttgggaatcctcctactctacgaggaccaagtaagactgggtgtgttaggggaagtcagcaacttgagttctgtctcgcagtgcctgggcggaacgtcccctctcctg

SEQ ID NO: 44982 - DNA, 2300 bp, Homo sapien
aatcacactcagtgaaatggctaatcaaacagatgggaaaagcaagtatggtgaagatgtagagaaattagaatttttatatgttgttggtaggcatataaaattgtgcagctgctgtggaaaacatttgtcagttcttcaaacaaattaaacatcaaattactacacgatccagcaattccaaacaattcaaaacatatactcaaacaaatacttgcacatgaatgttcaaagcaccactatacaaaatagtcaacaagtggaaacaactcaactgtttactgatggaaaagtaaacaaaatgtatatccaatcaatgaaatattagagctgtaaaataaatgaagtccagttgtcttgtggtttccagggagactggtttccaggagcacccgtccacaagataccaaaatacatagttgctcatgtccctgatataaatgtgtagcctgggtaacatggtgaaaacctgtgtctaccaaaaaaaggtacaaaaattagcctgccatgatggtgagcttgtagtccaagctacacggtgaggcagaaggattggttgagcgtcagaaacagaggtggcaatgagccaagactgtatgtcacactcaggataggtgacagggtcagactctgtccttccaatcccctgacaaaaagatgtagtatttgcacataaccgatgcacctccttctgtatattttaaatcatttatatattacttataatatctaatacaaagtaactgctatgtaaatagttgctatattgcttagggaatatggacaagacaaaagtctgtacacgtttggcgcagatgcaaccattcatttatttttcctgaatatttttgatctgtggttggttgaatctacagatgtctagggattcagaatccactagtacaaagggctaactgtactgatattatactacgaccttggaagcaaaaccgttattataagcaaaagaagctagacgcaaagtccacttacgtcaggattacatatatatatacacacacacatacatacgtacacacacacatatatacacacatacatatatacacacacatatatacacatatatacacacatatacgcacatatatacacacttatatacacacatatatacacacatatatacatatatatgaaaagttagtaaattgtgcatttaaaaacaaggcaatgcatggtgtatgaattatcctgatctcccaagttttgatgactggaaccgtaattgcatctaaaacaaataggtgatgtttttcagggaattccccttcgcctccatcatatcaaggaaaataaatggattaacaaacgtataactgtaagtaagaaacggatagcggagaaagtggagtccatttaacctgtacttggtgcaaaatagctgctgatagttgtttcaagcccgcgtgggtcagcggggaacagtacgtggaccccattgcactggacaggctggagtctgggtcggtgtcagagcttaaaaactgataagctgaaagccaatgcacctaccctttaacgtcatgtattttttatccctacatcattgatggctaggaacagcaggtaacatcctcataagattaagcaataagaaaatagactttatgtgtactctcacttgtcgttaatttcgtacattctctaacaaaagaatacggttggaataaaaatctaaacctttccagaacagtaatgagtaccttaccatacgggaacaccggcctgggaactacaaatccgggttggccacacccagaagaaatactctctttcctagaacgttgcattacgctccaatcccgagcaggtccagagagccgtagccgctcagcctgctgggacttgtagttctttttttaacaggcataggttcccgaggccactttcggctctgtcggcctgaggccgagcccaggatttaatgttccccaccctcccgcactccccaagataggttggtagtgttaggaagagtggatggcggagtcaacctcctccggtcacgtgtggtacttggcatgcagcgattggtcgccagagttatagggccccgcgttaagtccatgagcttccgtgagggtactctgccggttttgctgcggaagtcacctcgtggcgtaggggagaggtaacaccgagaagaggcagcggcggtggcgccaagacgattggtgccaaacagggcagaacgcaactcagctctggggtgggttcctgtccagaggggtagagaagagtggctgagggcgcgccctgatctcagcgggaagagt

SEQ ID NO: 44983 - DNA, 2300 bp, Homo sapien
catgttgtaaatgcacaaaacaaatatttagttaataatcaactccaagaataaagctgtaacaataatagttactattctctcatgtggtccatatttacctccacttagctggcatcttcaagtgccacatacttagcagcagcctggcaccttctgatattttgagaagcaggaatccctgagcataaatgtaaatagcttagaactgtccaaaagcaaagacagcagaaaataaaattgttgcttgctatgttcaggaaaggaatgcttccattggatatggaagccagtctcaattgttacatcagcctgaggaaactcatgcgagaaatgccagaaaaagaagacagcaacaaagaagataaaagaaagactgacaaaagcattgaatttctggtagaaaaagcagtgtactagaaggttaggagatttcctagctgtcagccatgaaagggttggggaagaaagagcaatttggttgcatactgtagcatggtcatctagggtggtcctcaaacacatagaaatcacacaagaattgtcaaattgaagatttggatttagtagatctgaaaacgcactttgtaaaattggccacagtagaggtggaagtgactgaaatactgcattatttatttatttaattaatttattttagtcagagtcttgcactgtcgctaaggctggtataccatggttcagtcacagttcactacagtcttgaactcctaggctcaaacaattctcctgtatcggcctcctgagtacctggcactacagacatgcacaagcatgcatggctaattttaaaaaaatttttgtagaaatggagtcatgaactcctgggctcaagtgatcctcccacctcaacttcccagagtgttgagtgagattacagttatgagccaccatccctggccaataaaggtgtttttaatacctataagaatattgcctgcaaggatgtttgataggtttcttgatatttcattctctcttgaaatgtttgcttcgtcaattttttatttttcataaaagctttactcaagaattaggatgaccactatgttatctagtagtataatttggaatcatttattataaatctgaaactgacttgactgatgaatcttgagcactgcttattgtgttctaattttggtagctgtttcaataaagtagctcttgtagaataggaaaactatatcattttagtctgaaataagcttttgattaaaaggttactttttcctattaataaaaaatggagattaagattgcttttcttgctacacaaaattatttacatactttcctgtcactagaaaagaggggaacataaaatgttccatggctgtaattgcagtgcttagagctataactcagattactatacttcctaaatgtaaagtggttattaattttagctggaggaaagcaggaatgttcagaggcaaatgaagattctgcagaataagcaagctcagattgtcaaagagaaagttcacttgcagagtgaatacagcaagaccatcttggcaagaagcaagctagaatctctttgcagggaacttcagcaaaattaatgtcaaaataagacattaaaggttagttggtttattttactgtatttcaggaactacttaggctgcttttataatcgccttgtaactacttgaaataaattcttgctctatgtcttttaatgggaattagttgctataatggcttcttgttaactggctcaggtacacttgtgctggtagatcagattcctaagcagacaactttgtagacatcttaacacagagatcccttgctttttgttttgcttgagctgatgctgcctgtgaggtaactctctaaagactcactctatgtaaattttggtttcagattcaaggataagctctaccttagtctactgtatacttgatcacagggaatctagatgacattggtttttatgttcacagctctcctgcttaaaaagctcacagttgccagatatttttgttggcttttggtgtagttggttatcatgtccttttttggtaatgagtgaaaatcttagctgaaatgaagaaactggtagccatagtcagtgtgagtttgagaaagaaaaacacactgtagagctctactataaaagttaataggatagattgttaaactacattctgccatctttggctatttggttgctaaatactttagaatattacttacagctaggctgattataacagaagaaggattaagtatgacagcttgtctcaataatggaagtaaaaagc

SEQ ID NO: 44984 - DNA, 2300 bp, Homo sapien
ggggctactttaaaaactattttagactccaccttctgcttcggaagagcatgaaagtcagatagaggtgacgttagggtcttagatcttttctgagcatgtatcttgccctggatgtttaatgtggctttctcagttctcaaatactacgtggaagcttttttagaatccctttttcccaaaatatctctttctctaggatttgcctcccaggcacttaaaattatctgttgtttttctagtctctctctttctctctctctctctcctccccacccccaccaccccattttaaagctggaggtggctgtgactaatacgtttgcttttttatactttccaaaaacacagcctgggaagtctcctgtcttctaagcgaactgtcaggcaggtgaaagaaaatcaggcccttgaggtagtcctccaggaagccaccagacaagtcaaaacacaccaccttagttcttcgggaaaaaggttcacatcatggttcctggcaccaatcagctgcaccagcatctcaggttgctttcccacagtagctgcttacataggaattggggcaagtgtgtgtatgcagggaacttagtgcattatagcactcttgtaccacaatgtaaaagcttttaaaaatccattaagtgttctcctgatttgggttttttattttattttattttattgcactgctctgaacatttcagcactagatcattgtttgagtagagggacaaagttgtggagtttccaacttcatcatttttggtgacttaattctatgactttaaaaatttgcatttctttgattatagaagcaaagagtcttttcacttgttcgtggacccctctatatttgttttttgaattacacatattttgagtacttttctatgaataccacttttaaattcacaatctcatttttcttttaggacacgtacttgaagatagagcctttccactcttcctacatctgttacagcatctagagacatctttgagttcacatctggcccattagttctgacccacacctctttctgcttttttctcctttttaggttgtccgcacaaaccagtgtgcaggggagtttgtcatcacttttcctcgtgcttaccacagtggttttaaccaaggctacaattttgctgaagctgtcaacttttgtactgctgactgggtgagtgagcatgcagtgggcctgcaggtagaaagtataaagaatatgggtaaggattattgtggagaagctatgcattgtggtctccagatagccacacacaatcttgaacgcacttgcagctacctgctggacgccagtgcattgaacactaccgccggctccggcgctattgtgtcttctcccacgaggagctcatctgcaagatggctgccttcccagagacgttggatctcaatctagcagtagctgtgcacaaggagatgttcattatggttcaggaggagcgacgtctacgaaaggcccttttggagaaggtgggtggtcaagagcagagcttagggatttagtcacatatattacgttacagagacacagaccaacattgagtaaccactgtgtgcctgatctttaagtcatgcattttgaaatgtaaagacagagtctgtatgtgtttatattttttcttccaatttctctacagctttccttacaaggttgagtccacatcagggctcagtgttggctgaggtggggtgtccacaaccctactcctagtctttacagtatatgtgggttgaacacccccagggcgtcacggaggctgagcgagaggcttttgagctgctcccagatgatgaacgccagtgcatcaagtgcaagaccacgtgcttcttgtcagccctggcctgctacgactgcccagatggccttgtatgcctttcccacatcaatgacctctgcaagtgctctagtagccgacagtacctccggtgagcatgggaacactgtggggacgtgaaggaggttttagagctgggccagatgtgtacccttcccggctttcttcctctaggtatcggtacaccttggatgagctccccaccatgctgcataaactgaagattcgggctgagtcttttgacacctgggccaacaaagtgcgagtggccttggaggtggaggatggccgtaaacgcagtgagtgacaggaaatggaaggaacccttgtgtaagccttatttctttcttttgggtattctcaaccttccttttctgctaacactgcctacctgttgcaacttacactctccaggctttgaagagctaagggcactg

SEQ ID NO: 44985 - DNA, 2300 bp, Homo sapien
tgcttgattgccctggccagaacttccaatactgtgttgaataagagtagtgagagagggcatccttgtcttatgccagttttcagaaggaatgcttccagtttttgcccattcagtatgacattggctgtgggtttgtcataaatagctgttattattttgagataatgttccatcaatacctaatttattgagagtttttagcaggaaggactattgaattttgttgaaggccttttctgaatctattgagataatcatgtggtttttgtcattggttctgcttacgtgatggattgtgtttattgatttgtgtatgttgaaccagtcttgtatcccagggatgaagctgacttgatcattgtggataagcttttattttaagttcaggggtacaagtgtagttttattacataggtaaacttgtgtcatggggatttgttgtacaggttattttatcacccaggtattaagcctagtacccattagttatttttcctgatcgtgtctctccccccaccctccaaactccaaaagtcccttatgtgtctgtgtattctctcatcatttagcccctactcataagagagaacatgcagtgtttggttttctgttcctgtgttattttgctaagaataatggcctccagctccatccatgtcttagcaaaggacatgatctttttatatgcttgttggccacttgtatatatttttaagaggagtgtctactgatgtcctttgcccatttttaatggagtgattgttttttgtttgttgatttgtataagtttgctgtagattgtgaatgtcaggattttatcagatgtatagcaaatatcttctccattctataggttgtttattctgttgacagtttcttttgctgtgggaagctctttcacttaattaggtcccacttacctatttttgttgcatttcctcttgggggcttagccaaaaattatttgccaaggccactgtcgagaagactgtttccctaggattactgtagtttgaggttttatgtttaaataaatctttggttcattccaagttaatttcttttgagacacgatttctctgtcacacattctggcgtgcagtagcacagtcatgactcaccttattgcagcctagaacttctgagctcaaacacccctcacacttcagcctccctagtagctgggagctatcacaataaaagttttataaaataagaaatttttacaaagttgttattttttacattagtagctattatacttttttaatatttttaaattttttttttagagacaaagtctcactgtgttgaccaggctgatctcaagcttctgggctcaagcagtcctcccaccttggcctcccaaagtgttgggattacaggtataagccatcatacctggccttgagttactttttgcacatggtgaagtataggtgtccaccctcagtcttcagcatgtcggtagccagttactccagcaccatttattgaataggaagccctttcccattacttacttttgttggccttgtcaaataacagatggtagtacgtgtctggctttatttctgagttttctgttctgttccattggtctttttgttggtctttgttacagtaccatgctgttttggttactgtcgcttcatattatagttcaaaatttgggtagtgtgatgtctacatctttgtcttttggcttaggttggctttggctagttggggctctttttttaagttccaaatacattttagaatttttttcaacttctgtgaagaatgatgttgatggtttgatagaaatagcgttgaatctgtaaattgctttgggtggtatggccattttaattatattgaatctttcaatatatgggcatggaatggttttccatttacctgtgttatctctgatcttttatagcagtgttttctggattttctggtagagatttttcacctacttggttagctgtatttcatagtatttcattttctttatcttttgctcatttttaattagtttttttttttcctattgtatttgttcagtttcttacgttttggatattaaccttttatcagatgcatagtttgcaaatacatttttccattctgtaggtcgttgccttattctgttgatgtttccttcattatgcagaagctttttagcttaatgtaataccatttgtctgtttttgcttttgttgcttatacttttgaggtcttaatccacaaaattcttgccaagatcaatgtcatggagctttcctcttatgtcttcttttagtagt

SEQ ID NO: 44986 - DNA, 2300 bp, Homo sapien
ttagaatatatacatacatataaatatggaacgaaattgagagtccaagaataaacccatacatttatggccaacggaatgttatcaagagtgccaagaacaattaatgaagcaataataatgtttccaacaaattctgggacaactagatggcaacacgcaaaaatattgagttggatcattacttcacagtgtttacacaagttaactcaaaatgtatcaaagactttaatgtagaagctaatactataaaggtcctagaatagaggagaagagtacatccttgtgattttgggttagacaaaatcccctcagaggcaacactgaaagtacaagtgacaatagaaaaaagcaaactggataaagatcaaattaaaaatctttctgttcaaagtttactattaggaaagagaaaagccagcttacagaattattttttataaaaatcaaatatttgataaaagaatcagataagattacaactaaacaaaaaaagacaaaccaatgtgaaaagagccaaaaattttgaatagacatttctccagagaaggtatataaagcatatgaacaagccaacaaccttacgaaaagatgctcaacactactgtatcattagtaattcaagaagtccaactcaaaactctatgagatctcatacacattgtaatggtcaaatcagtaagtcatgtaattatagtattggtgaggacatgaagaaactagaacggtattccactttagatggaaattaaatgatgaagatgctttggaaaagaaaagtttaaacctaaagttcccatataacccactaattctacttgtaggtgtatacacacgagaaatgacactaagcatgcacacaaaaaccggtacacaaatgctaatagcaacattataatagctaaaagtagaaattgaaatatctatttactaatgaattcataaaatataaagctgtattataatgaattatcttgaacagagaaaaaagatctcatcatttgaaataatacaggctctataactaattttatgaaatagaactctataactctaactttatgaaacagaaaaagtatgtagataaaactaggaaaaagaaagcagaaaattaagtaacaacttttgaaacaggaatatatatgtaatgtagtataataaactcatgaagccgataatctagatgaaatggataaattgttaaaaaaaaaaacggaaatgccaagaatcgtacaatacgaaacaattgtcaaactatcaaactttaaggcacttctggcagtgcccttccaaataaaatctaccatttgatttttaaaacttaccttttgcgtatttttcaaaaatatatggagaacaaaaagatactacagtagtgaactgattaaaaaaaaacagaatagcaatgtagggggatttttgcttaacgggtgtaaaatattgtaaataaaattataggaaataaagtgtaacatcttgttttgaaataaaacatcgcaataaagtataatttcccttaaaaacagcatgatatttccacatcaaaaaacggatcattagcagtgtgtttcttttgatttatggtacgtgtgtttagcgatgttgaaggtttactgtaatctgtccaggtctttgtgatcattttaaaatttagggtgctcctaggtaatttttaagggatgtttatcatgtgcagtaaaggttttattcaaaaacatttagcacttcttttccccgtcctaaagtccaagctcgagttggtaaaaaatccaacgacaaatgtgcccacttgaagtgcactgttaatgcaacagtttacaagaacataaatacattgtaccggcatcctgcctcctaaacgtcttgtgacaggaacgttctcgagctgagaacccagtgagtcttcagagaatgttagtaaacactttcacatgaacggatatcgccggcggtttgtcctggcaggaaaaaaaaaaggtgcgtttctacggacatttccgcaaaggaggaattttctccgagaaatccttcgttgatcagcaccacagccttttacggtccttccctgcaatacgcaggcgtaacttgcgcagtggtcccattttaaaaaagatccggccatactatttttatcttgctttttcgttctgtcgcagtactgtttaatatgagtccagcgacggctctgtgactgttttcctctggtaaaatcgctcttgcgtcctcagcgtttatctcaggtgcggaaggtctcacaggtttggaaatagcgccggaaaaatcgatccgcggagtgagac

SEQ ID NO: 44987 - DNA, 2300 bp, Homo sapien
gtgtagttgcagcatgttcttttggtaggtctttccacttattttatttcattttgaaatggaaaaagttcccttgacccccttacagggcatgtgatggggatacggcttacttctttggtgccctgctactcaaaacccctaagggaagaagcagatgggcaggtcatgtgaagtgtgggcttccaacccatggtagtatcttaaggtgaatgtttacagctcctgaagttccagtgggcatgtgttacagtgtgcttttttagttttatgcctgtaggcaactcatataaatcaggtcaattagaccctctgccttattgcaaggacagaggacctgtgtcctggagttcttcccctaaggtagtagaaaaattgaatcacacatgggcttgcataatgagtccaagtttttcttaaatgatgaatatagctctctgcatttattagtccattttcatacttttgataaagacataccaaagactgggaagaaaaacaggtttaattggatatacagttccacatggctgggaagtcttcagaatcatgatgggatgagaaaggtacttcttacatggtggtggcaagagaaaatgaggagaaagtaaaagcgcaaaccgctgataaacctattagatctcctgagacttatttactagcatgagaataacacaagaaagactggccccagtgattcaattacatcgccctgggtgcctactacatcatgtgggcattatgggagatacaattcaagttgagatttgagttaagacacagccaaaccatatcattccactcctggcccctccatatctcatgttctcacatttcaacaacaattatgttttcccaacagtcccctaaagtcttaagtcattttagtattaacccaaaagtccacactccaaagtctcatctgagagaagtcaagttccttctgcctatgaccctgtgaaattttaagcaagctagttacttcctagatacaatggggatacaggtattggataaatagagtcatccatattggagaaattggccaaaacaaatgggttacaggccctacagaagtctgaaatccagcagggcagtgacattttaaagttttaaaataatcacctttgattccaggtctcccatccaggtcacataggtgcaagagatgggttcccatagtctcgggcacctccacccctgtggctttgcagggtacagcctccctcctggctgctttcacgggctggccctgagtgtctgtggcttttccaggtgcacagtgcaagctgtcaatggatttaccattctgggatatggagggcagtggctctcttttcacagctctactaggcagtgccccagtagagactctgtgtgtgggctttgaccctacgtttcactttcacactgccatagcagaggttctccatgagggacatgcctctgaagcaaactttttcctgggcatccacgtgttttcatacatcttctgaaatctaggtttaggctccaaaacctcaattcttgacttcagtgcacctgcaggttcaacatcacatgaaactacctaggtttgaggcttgtacattctgaaaccatggatcaagctgtaccttttccccatttagcaatgtctggtgcagctgggacacagggcaccaagggcttactgcatcatcagtctgcaaattttctgatttttttctctgtttcccttttaaaatggaatgtttttaacagcacccaagtcaccttttgaatgttttgtcatttagaaatttcttcagccagacaccctaaattatctctctgaagttcaaaatttcacgtctctagggcagggggaaaattccactagtctctttgctaaaacataatgcaagtcacctttgctccagttcccaagtttctcatctcatctgagattacctcagcctggactttattgtttatatcactattagcatttttgtcaaagccattcaacaagtctctaggaagttccaaactttcccacattttcttgtcttcttctgagccctccaaactgttccaacctcagcctgatacccagctccaaagctgcttccacatttttgagtatcttttcagcaacaccccactctactggtaccaatttactgtattagcccattttcatgctgctaataaggaaacatatctgagactggaaagagacacagaggtttaattaaacttccagttccacatggctggggaggcatcagaatcatagtgggaggtgaaaggcacttcttacatggtagctgcaagag

SEQ ID NO: 44988 - DNA, 2300 bp, Homo sapien
atatttttattttattttttctgcacagagttctcaactaatgaaaaatcattgcattatcttgagagcaatagcaatgatcatgccaacagtaattcagactgtgtcataagttgggtcacacagtccctattttcaaactttgtggatgtctgtcaactggcagtgaattgtattcaggagaaaagaagtctaaagtaagtagtccaagtgtatgatgtcaagaatctgcccatacttggtagtcccttgctactgtacaataatagtggtgcacatttgaaggactgagatgccactaactctctgctccaccattttggggtcacagtgcatatcagtggagggaagcaagtgtttagagggatcctggctttggaagacatttgtgatgatgctggttgaaagcaaaagcatacagcactcagtattaccaggtggtctccaatctgaatcctggttgataagatacaactttgctcaaaatttgctttttatggggatgtatgtggtggcttatgtctttaatcctggcactttgggaggctgaggcgggcggatcacgaggtcaggagatcgagaccagccagtctggccaacatggtgaaaacctgtctgtactgaaaatataaaaattagccaggtgtggtgacatgtgcctgtaatcctagctactggggaggctgagccaggagaatcacttgaactcaggagaaagaagttgcagcgagccgagattgtgcaactgcactccagcctgggcaacctagtgagactccgtctaaaaaaatttttttttttgcttcttaatcctattttacgtaatacaggggaaaagttgagtagaaaattccagaagtgcctttcttcccattgcagaagacagaggacccctgcacctgacttgcagttgtcttccactgtgagtctctcaggaacccagaagcctgaccttagagattacacaatacttcgtagctcagtgtgtgtgccaggaagtgtcagggtttgagcttccaattcttaaattccgcttcatctcaggtacactcctgctttgtctctgactgtttttcctgctaggccaatatattaggagatgtcaaagggctgagagtgtaccagcccaacttagctgacctttcttagagccactgcttatcaaccaactcaagacctgacacaggacattccctggctgatcaaaaaataatgataagagctttaagggaggggcacaataaaagggtaaatctcaaagcaggtggctgtactttgggcttgctcaggacataatgtaactgtcctgggtctggaaataactcagatggactcacagagcagacccagatacaaagcagacatctgtaggggcttttactaccccattcatgttcatatatgccatagtaatgaatgtattataggatgtgttcttgtttgtttttctttctatttttctctgtctttgtcaaggaatcccatatttgcaaagtcccttgcccttactgcattagaaatgggcattagaaatgggactgaatgttgggtccatctagcatcctggggccttgattataaatacagtttgtaaaatggattacagaagcaaatgaaagattgtttaccggcatcttatttggtggggaggaaatgtaattcagtacagtagtagcccaggttttgtggagacagaggtacattggggaaagctggggctaggagtttcttattgggacctttagtatatgggtgaattttgtcagggtctggtatgcggaaagattcatagaagtagttgtcagcagacaaaagagatttgtcagcaaactaaaaatctcataccctgagacagtgatggaggaaagaaacttgtcaggaaggttttctagaagatgctgcattctgcagtggacattttcacagctgaaaaataagtggcaacatcctaagtactcataatatcaaggtggtaaaatcctgctctgcttttgagcaagatgatataagtgaatcaatacattcatgctattaaggttataggtttttacagctttcacttgcatgaaaaaacatgttgtctatgcttctgcagttctcagggcagtgaacctaagccaggagctgcttaggcattaaggcttctatacccagaatcgtgtgctaagctttctctccaagtcagcacaacaaagcaaaccagagcatcgtaccaacaacctgaaaggtcacctgactccttccttctcactcccattctgtacttctgcatacgtgggcaggcaagtgaatggtaagta

SEQ ID NO: 44989 - DNA, 2300 bp, Homo sapien
tcatcagaacagcatgggggtaactgacatcataatccaatagctttgcatcaggtccctcccttaacacatggggattataattccagatgagatttggatggagacacaaagccaaagcatatcaacaacacagcagtatttatctaatggacctaggaactatctctttgaaacgtaaacataaagagagaaggtgcccctctgtttccagtttcagtaaaaggtaagaacttaacctcagtaggtgcttttctctgaactgcaaaacaacctcttgagattaaaaatatgagaagtcagtttctcttctgattaaagacaattagctatataacatgtggtcccctgttaccattgtaaactaagggtatgtgacaaatggtgccgttaaattttctttattaaagactactgatcaaccagtaatttcttttaagaaaatttgtctatcttgaagactaccttgatgcttagctatataaaaggcgagatttgtttttgactttgtaatctcttggttgattttctacaatgtacattaaattcatatttcatatttttaacagtaaaactgatttcattctctactgtctttgtggagaggacttctgggttcagagaaaattttatttttaatgttatggcttcatcactaggcttttaaaaacaaaaccatgaagacttaaattccttaaaaccagtagtgatgatcagggtactaccacttaccttgcagaaaaaaagaaagaaaaaaaaaggattaggaggatactacactatgtatatgatggccaattatatgcccaacaagtaagataatttagaataaatgaacaaagtcctgatacatacatactatttaccttgcagaaagggaaaaaaaaggattaggaagatactatactttgtatatgatggccaattatacgcccaacaagttttataatttagaataaatgaacaaatttctggtacatacaaactaccagaactgacttgggaataaatacagcacgaattcataatccaaactaaggcctaggaccatttaaaaaatttacatcaatcctcgaatgtgtccaaaaacacagaagaaaaagggacactacacagttcattctgtgaagccgggattatattgatcctaaagtcaaagtcatcacacgatacaagccaatatatcttaacacagatgctaagattctaaacataatagtacacacacaacaaatccagtaaattaaatgattgtataccataatcaaatggaatttgtcttgaaataatttgacctccacagccagtccatttgagacattcggttaagccatgatttattataagattcagatgcttagtctcactccttcctatgtatatttactttccatttcctgtatatatttactgtctactttttgtcagtattccgctgggtgctagcaattgtaagcaacagatgcggcctctgtacttacatgctttactgtgaggtggtgaggtagagaagataagactgaaaaaaataggccgggcgcggtggctcactactgcaatcccaggaatttgggcggcagaggcgggaggatcactaggtcaggggtttgagagcctggccaacatggtgaaaccccatctctactaaaaatacaaaaattagacgggcagatcgcgcccctgcactccagcatgggcaacaagagcgaaacttcgttgtcaaaaaaaaaaaaaaaaaagagagaaaagtgataaacattctgaacatagagggccttgtcctaagccagtcctccaaattcactgtataagagtaagggctctcttaaaatttaggcgtttacagttaaatgacccacgaacttctgaaactggaagaccgttttttagcaaaggagaatactccagggccccgcccatttcatccttgactccaccttctccatgctgagtcccgccccgcttcctgtttattcatcctgcagcaaactctccggtatcctgatggagtctactaggtgtcagtcatttggccgtgcctcagccgaagagaggcggggaaaagcatcgtaatcagctgcgtcgccttttggtgacgccagagagtgcgcgtcagcagtttattagagagctctgtagccagcctcttctgcgcacccacctgctgcatcttagttcagtcggctcttagagtagtaaccgccagaaaggagtcggaagaggtctcacgaggctgtcatcaccgccatgcccaagaataaaggtactgctgtaagcctctgggactatacctcggcttg

SEQ ID NO: 44990 - DNA, 2300 bp, Homo sapien
cccaggttgctttctcaccattctgcctgccatcatcatttattaagggccagttgtatttcagactatagtatttttcaaatttgacataattctcactgatagtaaatggtacatatatttttgtggaaagacataaagtttttaattctttgttttcattgttaatataatgtgcagtaaatattttcttgcaggcttgggcaagtactgtagaccatctgtcctcatccatttaaaggccaatggtgtttcaggcattcagctaggtatttcagacattgtagttcccaaatgccggtctgttaaatagtattggtgcaggctgaattttcagtgctctgaagtcaaattagaagatacatagttacgatgtttttcatggagcacaattgtttgcttacctttttaaatatatattttaataacttttttaaatgagaaagtgtataaggtagtaatttttattagtgttctaatttggcaaagcaaaattgaataatctggagactcatttacctaatattatttttaacattattttaatattttgaaatttaaagttcttgaaatccaaatctgggaaaccacaagtctagttgatgcagctgaataagtctgttctcctctaaaagttttatagtttggtagtgtaaagttaaggcatacataccaagtagttaatggtacaaaatgttgtaaagtacatgctataaagtgagcggtatataacaaagacagtagtagctgtttaatctccaaccttcatactatttacatgttgtaggtctgtaaaatacatttgatttctactcatggaattcatcaccattgtttaaccacattgagaaactactgctatgtctatatttttattctcttgatattaggtgaagttttctgtagtcatctgtcaagtctaagttggtttgtaatgttcaagtcttctgttgatcttttgtctgattgttcttttcattactataagtggcatattgaagttactttacttttcatcttgagaatttctactttttaaattacttcagtgtctttattgactttttctgtttagtgaaataccattttcataatttccttaatatttttagacattatttctttttaagtcttagataaactaagtccaacttctgggattcctcaggaatagtattttttttttccctgtgtttgagccacttttttaaatcttttttttttttttaaaccgaacaatttaactacaacatagcagttctggaaatcagattgctgcctctcggggctgttgttgatactgcttgtttggtgacttttctgaactaattctttggccattgaatagttggttagtttagtgggcagttcatgtttgaactaagatttcattaaaaccaccaagaatttaatcatttaaagaggaatcttgtacatgtagaggaatactttgagcattcagccaatgttggtaaactgacacctcttccttagtcttcatttcttgctgtgcaggatctcaagttcagtcaggggtaatattagggctttcctatgtctttctttatcatgtgcactactctgaacgtatatttggcctgttagatttgtagaagtatgttggactttacagatttcctatggatatctcattccagagcttttgcgagttttttggtttattttttgtctcaactgttactaccacttaaggcatgttaaaaaattgccacagattattttttctacaaaagccctgtggggtaaaccacagtgattaagctctgaatcaagtgagttaaagaaaagttcttaaaatggaagtttccgggaactgccaggaaattctctatagaatggtgttatcaaagaacttcggacttggtctgtgcttttcagtagctgctattgtgttggtttttattaaactgaggtaaggaatgggaataggggaacttaaaagcccacactgctttttcttagtaaggttcacctatttttcgtgaataaacgctccttagtgtttattgcattcatttggttaattttcagatttctgatatatggattttgaccatgtttgtcaatgttcttatttcttttctgaaggaacaaattttagcaagtccttattctgccattcctgcaatcactgcaagaaagcatttattttgataagacttaattacacattgactttgtttctttttcatatatcaaataaaaagttgtactgtgcttttaaaatgttatttttatgtccattatattattcgaattatcattttaacaaaaactgg

SEQ ID NO: 44991 - DNA, 2300 bp, Homo sapien
aaacattttaggcactgttacgcgcttacaaattggtaaaaatggtcgatgttactgtgttgtgttctctctacagttaaaggaaaaagaaaagaaaagctggaggccaggcttggtggctcatgcctgtaatcccagcactttgggaggcagagtcggtggttcatgaagtcaggagtctgacacaagcttggccaacacagtgaaaccctgtctatactaaaagtacaaaaaaacagccaggcctggtggcgggcgcctgtaatcccagcgactcaggaggctgaggcaggagaatggctttaagccaggaggtgtaggttgcagtgagccgagatcgcgccattgcattccagccccggcgacagtgccagactccgtctcaataaataaataaataaataaataaaaataaaaattccgtaaagtgctggcaggtgcctgtgggtctcagcactgtgggaggctgaggtgggaggaacactcaacccccggaaagtcgaggctgccgggacctgagatggcgcccctgccctccacccggtgcgacagagccagaccctgccacattcaaaaacacaataaaagaaagaaagaaaaggaaaagaaaaagaaaaagaaaagaaatacctagaaaataacacaaggaaatttttgatggtgatggagatgtttattacctcgattgtgatgatggttccgtgggtttacgcctatgtccgaactcgtcaaacggtacagattaaggaagtccatttggctggttgtgttttgtatagcaattccacctcaataaagctgtgacatcacacacatgcgagcgtggtacaacttacatagccgagttcacctttttaaaagtgaattgttttggaggttttagggacatgcacagagttgtgcaaccatcacctcaagttaatgcaaaacaaggtattgaacttacaattcacgtcccataaaacctaccctttcaaagttgacaatacagacgattttaatacattctcaaacctgtgaaattggccctaattcagaaaaacgaattgtttcttaaatcatgattttacaatacaacatgtcacagtcacaaggaatcatacaggttatttcttaacgattggcttttttttttttaaggcggctaaatcctgctccttcagagcttctgttaaatatttttaaagttggcgaaagataatttttagagtgtaaactgcgtcctcccagcttagccgacctgaggggaggaagcacaacaaaaagtcccgtggcataactgacacctatgaatcagtatcagaaactgaatatgctaagaaactcagttccgagctgtgacctctacaacggaagaataataggttggttacccgaggcggaatctggaactgaaattctcactcatttgacttcccgctgtttatcaccgcagattacggttgcaccgtaaaaggagaggttctgttccgtcgcgggatttcgccatggtaagacgtctgcgtcctagctccggatttatctgcctccatcctttgaagaagggccttccatcttggcaagcttttacttttcgggtaccgctgcttggcgggtgggaatgctgctggtgctgcttcaggaaacccgatttggagagcggaggtctgagaagagtgcggctgggggttccgggctggcccttgtgctcggcctgggcgccggtggtgctgttggcacgtgagtcttgttaggaataagcttcctcggctaaccttacaagtccacccttgactccgcagcccagcactggctttttacgcgggttagcttatatccatacgttgaagcagtctcagattcgcttggagagcactgtggacgctgtcttgacagacgccagagagactcgtgaggttgtcaaaggtctgggagttttgcggggtttgttctggagtctggcaggaagtaatatttgctcaaaactgggcgtgaaatagcctggactgtcctttctcctccgatccggtattacccgttagcagttgttacagctgaagataaagacattttactgttaactgagacgagtttctctgaaaaagtttggtgtctttttcaggcccggggccccaagaagcacttgaagcgtgttgcagcgccgaagcattggatgctggataaactaactggtgtatttgtgagtataactgtatttgctttttactcaaaagtgcatgctgtgtacctgtggcttgctatttcgtgggaacactgtttgcttatttatgtgagattttcgttggtgaagacttgctgca

SEQ ID NO: 44992 - DNA, 2300 bp, Homo sapien
ctttcatttttagaataaatattacctgtcatccagacttctggcaaataacttgttgtcagtgttcagaagcaaatatttgtttttatttataaatttccagaagggccactgataggagagaatctatctccttgcttcttctaaatgcctgtcttcaaactttcattgttttgaaatcttccttttcatcaaaaatgccttcatcaataatactggcataaacctttggtcagtttgaaaactgaatatttttcctattgataagcctctatataaaggccactggcattagacagttttcctcctgctgtttctaaatgcctcttgcaaactttgctttgtggtaaaaatctttctttcttattgaaagaaaaaaaaaccaacacctgtcaagagttctggtacaggccaggtgtggtggctcatgcctgtaatcccagtattctgggaggctgaggcaggcggaccacttgaggtgaggagtttgagaccagcctggccaacttgaggtgaggagtttgagaccagcctggccaacatggtgaaacccatctctgctaaaaatacaaaaattaacctggtattgtgatgtgtgcctgcagctactcgggaggctgaggcagaagcctcacttgaattcaggagatggagggtgcagtgagccaagatcatgctactgcactctggcttgggtgacagagtgagactctgtctagaaaaaaagaaagaaagaaaaaaaaaagaaagctcttgaacaaatcttttttcagctttgagaactataatttgttaatattcagtgtcctcaggaagccaactagcataagaaaattcctctccttgctcattccaacagcctgtctgacaacttttctttctgtttaatttttttttcctagaagaaaactacatatcaacaagagttctggcatgagggttgttaccttatttgagggaagggtattcatttattttcatattttttcaggaaggccactgatagaattcctttcccttgcttcttctaaatgtctgcaaactttgcatatagaagttttcctttctctgaaaaaattacctgttttaaagagttctgatccatagtttcttgcatatttcagggccaggtatttgtttatttttgtgatttctatgagagccgctgaagtgagataactttcttgctccttctaaatggctattggataagttatctgttttagaacatcttcctttttctaaaagagaagggccattctcatgagttctggcatgtactttgtggtaagctttcaggcttagatatttttatggttcactaacaggtttactgttgctagaaaaaaatgccctttcggctttttataaatgcttgtcaacaaacttttctccaaggaaatgttttccatttcctgaagagaaactacttatcatcaagagtcttttcataaagcttgtgtcacctttcagtgcctgaagtatgtttatattgatgggtttcctgaaaaaaaaaaaaaacactgggaggaaaaaatcaaccttattactccttttaaatgtatgtttgtgaatttcttatcaggcctctgaacccaagccaagccatcgcatcccctgtgatttgaaggtatatgcccaggtggcctgaagtaaccgaagaatcgcaaaagaagtgaaaatgcgctgccccgccttaactgatgacatcccaccacaaaataagtgcaaatgccagtccttgccttaactgatgacattctaccataaaagaagtgaaaatgtccagtccttgtcttaagtgatgacattatcttgtgaaagttcttttcctggctcgtcctggctcaaaaccctccttcactgagcaccttttgacccccattcctgcccaccagagagcaaatccactttgactgtaattttcctttatctacccaaatcctataaaatggccccacccttatctcccttcactgactttcttttcctactcagcctgcctgcacccaggtggttaaaagctttattgctcacacaaagcctgtttggtggtctcttcacacagacatgcatgaaatttggtgctgtgattcagattgggggacctcccttgggagatcaatcccctgtcctcctgctctttgctctgtgagaacgatccacctatgacctcaggtcctcagactgaccagcccaagaaacatctcacgaatttcaaatctggtaagcagcctctttttactctcttctccaacctcccccactatccctcaacctctttctcctttcagtcttgg

SEQ ID NO: 44993 - DNA, 2300 bp, Homo sapien
agtcagcaccctaagaaccactggcttgaaattcttgctgccaacagagcagcatgaagtcaacctgggatgatcaggcttggttggggaagaggcatccaccattactgaggatggagtagacagttttcccctgacagtgctaaggaggctaggaagttcatactgggcagaattcaccaaagcatgtcaaagcggctgtggccagactgactctctagattcctcctcactagggagggcatctctgaaagaaaggcagtagccccattcaagggattatagacaaactcccatctccgtggaaaaagagcacatggggaaagggctggctatgtgcccagcaacagcatacttaaatattcttgcctgccatctctgaagagagcagcatctgtcaagaaggattctcccagcacagtgctccagctctgctaagggacagactacctgctcaagtaggtccctgacacccatgactcctaactgggagataccaccaaacaggagtagacagacaccttgtacaggagagctgtggctggcatcaggccagtgtccctctgggatgaagcttccagaggaaggagcaggtggcaatcctttctgttctgcagcctccactggtgacacccaggcaaacagggtctggagtggacctcccgcaaactgcagcagacctgcagaagagggacctgaccgttagaaaaaaacaaacagaaagaaacaatatcaccatcaacaaaaggacccccactaaaaaaacctgtccaaagatcatcagcctcaaagagcaaaggcagataaatccatgaagataagaaaaaaaaaacaaaaaacatgctgaaaatttaaggaaccagaatacctcatcttctccaaatgattgaaattcctctccagcaagggcagaaaactggatggggaatgagtttcatgagttgatagaagtagacttcagaaggtgggtaataaaaaactcctctgaattaaaggaacatgtgctaacccaatgcaagaaagctaagaacctttataaaaggtgacagaaattgctaactagaatacccagtttagagaagaatataaatgacctgaaggagctgaaaaacagtgctaaaacctttgtgaagcatacacaagtatcaatatccagattaatcaggtggaagaaaggatattagaggttgaagaagagcttactgaaataaaacatgaagacaaggttagagaaaagaaaaggaatgtgaagtagaaaattaaaagaaaattaaagcttgcttaaaaattgttgttagagttaggatggaataggcctcaaatagcccccttccaaagtacgagttaagaaagaatactaactacttctctgtgaaatattaaccatatctaccctctgcatattttgtaagttctctaagtttctgttttactgctgaacagctgaaaggtcacaagatagataaccactagctgtaaaacatgttttatcaaagatgtaagacgtgtcacagatgattaactgcttttgttctcgcttctgtaagcctgcttcctgcctcatgtactgcctgccttaagatgcataaaaggccgggagcagtggctcatgcctataatcccagcactttgagaggccgaggcaggcagatcacgaggtcaggagatcaagaccatcctggctaacaaggtgaaaccccgtctctactaaaaatacaaaaacttagccaggcatggtggcaggcacctgtagtcccagccactcaggaggctgaggcaggagaatggtgtgaacccgggaggtggaacttgcagtgagctgagatcacaccactgcaccccagccagggtgacagagtgagactctgcgtcaaaaaacaaaaactgcataaaagatacttgccttgtttgtttggtgctcagactttctggacactagtccactgagccagtgtataccttaaataataaatcgtcctttgaccccatcagtctctccagtctctgatttcctgtaacattttctaggggctcatccaggattggagatggcaaatgttctgtctcctttgcccataggactggagcccaagagcaggggatacctgaaatcctaggcactgacaggagaacttcagactggagaggagaccagctctcctgcatcccggtgcccttccctaacagcacaatggaactggcaaaggggctacaggacaattccaggagctgcgtgcattcttcaaaaacgtggtaaggcctgaagccccaagtcaagacccatcccataaggatgaaac

SEQ ID NO: 44994 - DNA, 2300 bp, Homo sapien
gtttccggataaaactgtaccacctcaggtcatcctcaggcgttacattctccacagacaggtattgcaggtcatcctccggcatcacattcaggccacagataggtacgggttgaaggccaggattcagggatccttgacctattgtatatttcaaatcacttaaagatggtaaaatatttaaaatgttctcctcctagaacattttaatttgcttgatttaatcttttatccacatatcccgctgggcgtggtggttcacccttgaaatgccatcactctaatagtcccaagccagcaaatcacttgaacccaggatttggagactggcttgggcaatatggggaaacgcatgtctatttaaaaaaaacacaaaaaatttcccagctctggtaaaaagccctggtagtaccagctacttgggaagctgagttttgggaagatcatttgaggctgggtggaggaggtggcaatgagcagtgcattttggcaacaggggatatacatctcaagaaagaaaatacacaaaacctcacactgtacctcataaatatatagttttcaaataaaattatttaaatggggcactccttcacattacaacttaggaaaattacaatagcttttcttatctaagttttagaaatgagattttgtcaggtccatattaaaatgcagcatttatctgtgaagtcagtgccccttttgctctgtatgttagaaattttacatatttatttattttttttcttttttttccttttattattatactttaagttttagggtacatgtgcacattgtgcaggttagttacatatgcatacatgtgccacgctggcgcgctgcacccactaactggtcatctagcattaggtatatctcccaatgctatccctcctccctccccctaccccacaacagtccccagaatgtgatgttccccttcctgtgtccatgtgatctcattgttcagttcccacctatgagtgagaatatgcggtgtttgattttttgttcttgcgatagtttactgagaatgatgacttccaatttcatccatgtccctacaaaggacatgaactcatcattttttttggctgcatagtattccatggtgtatatgtgccacattttctttatccacgctatcattgttggacatttgtgttggttccaagtctttgctattgtgaatagtgccacaataaacatacatgtgcatgtgtctttatagcagcatgatttatagtcctttgggtatatacctagtaatgggatggctgggtcaaatggtatttctagttctagatccctgaggaatcgccacactgacttccacaatggttgaactagtttacagtcccaccaacagtgtaaaagtgttgctatttctccacatcctgtccagcacctgttgtttcctgactttttaatgattgccattctaatggtgtgagatggtatctcattgtggttttgatttgcatttctctgatggccagtgatgatgagcattttctcatgtgttttttggctgcataaatgtcttcttttgagaactgtctgttcatgtcctttgaccactttttgatggggttgtctgtttttttcttgtaaatgtgtttgagttcattgtagattctggatattagccgtttgtcggatgactaggttgcaaaaattttctcccattttgtagggtgcttgttcattctgatggtagtttcttttgctgtacagaagctctttagtttaattagatcccatttgtcaattttgtcttgtgttgccattgcttttggtgttttagacatgaagtccttgcccatgcctatgtcctgaatggtattgcctaggttttcttctagggttttcatggttttaggtctaacgtttaagtctttaatccatcttgaattgatgtttgtatttaaagtaagaagtactaaaaagatgtcagcctctgaaagggaatttcacttgagttttcaacatggtatgtaataaatttttatatttttagcttatttatttttatctaaatatagatttttctttgaccatttgcagcacaatggtagaagcagatcatccgggcaagcttttcattggtggcctcaatagggaaaccaatgaaaagatgcttaaagcagtatttgagaaacatggtcccatatcagaaggtaacccttaaaaccgtgtgtgcgtgtgtgtgtgtgtgtgtattttcatatgtatatttcaatatgtatatttaaaatatgtctgttatatatatgttttgaaaaaacatgttt

SEQ ID NO: 44995 - DNA, 2300 bp, Homo sapien
ctgtggcctgaatgtgatgccggaggatgacctgcaatacctgtctgtggagaatgtaacgcctgaggatgacctgaggtggtacagttttatccggaaaccatcctccctactccctcgctggccctccctgtccccgtgacagcctcactgccccacctggcctctgtcacattgctcctaccggaagacccgccccaccacgtgcccctcggagacctgccgccagcccccactcccaaacctgtccacctcgccgccttcttcccctgcgcaacctttctctgaggaaaaactgacttccactaaaccagtccctgatgcgaaaatagcaatgaaagagtccattacgttacccaggctggtctcaaactcctgacttcaagccatcctccgacctccacttcccaaaatgctaggactacaggagtaaggcagtgtgccaggttaacagaataacttaagcgcatctattttgttccagttttcggctatctaacaccatttatctggattacacctacttattcggtttaaattatttatggtgccaaagacacatgaaacatgtttcaaatactgtcatacaacgaaggagacaattacaggctttacagaggcaaactgaaactcagattatttacggccccagacttctacataaactaacgtaatacaatttatgtcaaaatttggtaattcccgtcaagcaaatcagacatgtgacatgcgctgactaaaagtataagtttttaatagccttggttaaatatattgcctgtattttgaatgatgaccacattcacagagaaaaccctgtttaataaaaagtgcacatggcgccttagcaccatctcccacaacttgcccacatgtcggacatatccgacagttaaaggtagaatcctcaagaaaattaatgagtttaacaaaaatgagtttcttaatagcactaaggagttctctccccactgtctcctcctataattcaacaccctcacatggaaaacccatccccttttacagataaaatcgcaaaacttttctgttcttatcaagagaccaacctgtccagagaaacagaaaatacacgtgcttttcagcaggacaaacagcctcagggtcgcccggctctcatgtcgtatgcatccggctttgggacaccacggggccaactgcgggaaggactgctggaactggcctgagggggaaggacgccagaagccgtgcccggaaatcccgcctacctccagcggccaatcattgcgagggcggggggcgtcgaccagttattgcgaggactgtaggcgtcttacgaggcaccctgcccctagttggcaggcagctccatcctcccgcggtaagcctcctctgagaagctgcttgtgcctggcggcggaggattccgacacacgcggactgtaagccctttggcattgtgggcatagaagacctacaccctaactggcatcctgagtgtggcaagacattaacccacagggaacatatgaaacatcttacttcattaggcaggttaggctgatggtactaaatactgcagatccagaggggagagtgaagaaccaggcgaggacgccgcagctgcggtggcttggaggggagtggggcagggcgggtgcctgggagaaaagtcgacgggtaagttgctggggtggaattcgtctgcaccagaagctgaaaccccacaaggactctatcaggtctaggcaaacacagactccgagttccatgcttcctccctgaggatgctgtactcacaggggcgttccaaaggacctctcatcctgtgcccctgggcacacgggaggccagccgccatggttgccaatgcgataacccgtgtgcactgcctcgctggcacagatcctcccgcaagcgccgcagtggccgtcgtgcctgccagtgaggctctggaagcccagggcctcggcctccgactccagggctactgtgtacagctaaccctgctgggtatctgggccccatggtgagtgtggcggactgtgggccctgcggggctccccaggaaccctgtatccacgtgggtgtggcacatgtttctcagaagggcaaggcccaggggcccttccgggagcttcctctagagtctaggggtgccaaggacatgagatgggcagtgtaggccttagtctgtgggagcctcaaggagggcaccatgttaagggggaggtgctgcaggaaagggcagcctgtgcgcagagcagggaggcaaccctgggggaggaggcatgctagtggctagtgggggatgacatcat

SEQ ID NO: 44996 - DNA, 2300 bp, Homo sapien
gcaaagtccattcactgatacattcaatttcatgatgtgtccataaaatagactcttgatttttatcttggatcaaaggttgtgtttactactggagactcagactgggatcacggagtgattgattcagacacaggtagtttccaggtttttcctgctgtagggatatgctaggtccatggtaacactgtggaaactacagcccatgcctctgggttttctgctgaatattcctcgtagttccataatataagtatatcagatacagtctgtgtccagataattcctactggagactgggcctgcagccacagtataattttgtcagaaactggctgtgtggaggtaatgactgcagaagattcagcctgggtccaaagtgcaactatatcagatacaggatgtgtccagggatttgttgctagaaaaaaaggtttggtccatggtgtgactatggaaactattgcctctatccacgaattgactgctagagatacaggctgggtccacaataataatgtattagatataggcaatatacagggatttactgctgaagattcaaattggatcaatcctatgtatgtgtcagatacaggcagtatccatgcaattaatgctgcagattcagattgggaccataatctggttgtattagatgaaggctgtgcccaggcctttactgttgcagatacagcctgtgcccaaattgtagctgtatgaaaaacaggctctgtccagggatttattgctggaaattcagcctgggtccagggtatatctgtggaagctatagcctctgtccaggtatttaatgatagacatttggtttcagtacaagctttcagtgtaccatgtaaactttgtgaaaagaagattaatgatagagttgcaggctgtatacagtatgagtgtatcagcaacaggctttgaccaagcatttactgctaaagattgagtctgggtccatggtatgactatatcagtctcgacctatagcagaggacttggggctggagattcaggatctgtccagatatttacaactggagacttagactccatcatggaatttacagcttgaaattcagcctcgttccaagtgtttactgatggatatttcatttgggtctgtagtttgcctgcatcaggtagagattgtaaccagaaagtgattgctggaggttttgtctgtgtccatattatgactgtatcagataaagcctctctcctgggaatcattactagagatacagccatgtactgcagtgtgactataccagtttcagccactgttaatggatttattcctggcaacagatcctgggtctatgatgtgactattttagttttaaactatctctattgttttactgctacacaaacattcttagccaatggtgtcactctatcaaatagagtgtatgtgcagggattgttgattttagaatgggcctgggtccacagtatgacaatttctgtttcaagatttgtggagggatttactcctacagattcagcttggtttggtggtataactgtagctggtatgggctgtgtccaatcatttactttttgtgggaaagagagtttcaggaatgccagatgaattggtctcccctgtgtgagacacccatggggagccatatgtggcatctgaggagaaaagtgtccttactgccttcatgtctttatgccccaagagcataagagctcagtggcatgccacaccttgcttggggaaataacactcccttgaagcagtggagtaaaatcaaacatcttggcttctcctgaaacctgctcctacccattttagtcccgatgaattgaaggtcttaagcagtttagacccacgcttttgctagggaaattcagatactgccactgctatacatcttattgaacgactcacgagttctccttcgctgattaatccttttcctcatcccttcttccccctcccgcctgccctaagaacaaagagcttgtaaaccaataaattgggtgggggctgagagctccaggctatgagtaagagtctgacactctggtcccttggactagccttttaaactgttattctgtctctttctaattctttatctccgccggactcggggtacctgccggattcgaggtaaccgccagctggtgtggggctggtttccccaacatctggtggccaacgcggggctccccataatctctacaaataatccagtgaaggaacgccagagcgtgcaaagtggaggacgactgacaaaggacacctgaatatgttttcacttcaagctcta

SEQ ID NO: 44997 - DNA, 2300 bp, Homo sapien
caggcccagacaacctgctctgaccaggggctggcactgaagaagtgggcagggggttgggggcggggtgttgttgtgtgaggcgactacttgctcggcgtttctgagctgcaggaggccctcctgtgctgggtgctggacaggctctgctgctgtctgggtgtgccgtctctccttctcctggtctccctgaggggtgcacgtgtccaccccaggcaaccgctgtgggtagaagtagctacggggctgtgcctggctctccccgtggagctcgagtggtttcaagggagcttatatatactcagggcctaaacatctttgggtgcagcgctggcagagggaagaaattgtgtctggggagatagtgcctgccttgcataggacagcagccccgtgcacagtgacaccgagtcttgagcaccttgtgtttctggggtaagcttgctggacacaggcaaggggagcagggaagttccgtggctggcatgggcatgcagactccccttcctccagggactttcccggtgaatcgtatccttcaactttctgctgttatgatgggtccttggcgctgctattctccctggtgagtgctgtgcttggcttcctgtccctaccacatgccctcagggcacatgcaattaagctgccctcctatccgcatgagcctgttctcagttccccttgttgtcccccatgccctgaatcctggctgaccgccagtgcctaccaccttgtttccccccacctccgctcccgggagctccgcgcccatcccctgctgccaaccatcccgaattggcagctgcaaggatatggctctggcccagaagccggggatgccctgtggcctgggacattcacgtagccgagctccaagtgaaggacgtccagcgagtctgttgctggccggggcgtactggggccagggccaggctgtgcctgcaggtcctcctgctgtggctccacattggccttcctccttggccaccacctccatctctgcaatgatgtcatcccccactagcatgcctctccccccagggttgtcttcctgctctgtgcacagaccatcctctcctgcacagcctccagccttaacatggtgccctccttgaggctccaacagagcaaagcctgtgcctcccaccccacccccccggcacccgtcaactctgggggcaactccaggagaggcctgcgggccttgccctgctgagaaccacatcctacacctatgtggaacagggttcctggggggccccacagggcccttagcctgtcacactcacactggggctcagatacccagcagggttagctgcgcacggcagccctggagtcggatgccaaggccctggcttccagagccccgctagcaggcacacggccaccactgcacttgtgagagcctctgcaccagcaaagcagtgcacacggatcactgcattggcgaccatggcggtaggcctcccgtgtgcccagggcacaggatgagaagtcctttggaatgcccctgtgagtacagcatcctcagggaggaaccatggaactcggagtatgtatttgcctagacctgacagaatccttgcagggtttcagcttctggtgcagatgaattccacctcagcaacgtaccagtcgactttagtcccacgcacccgccctgccccaatccccccaagccaccgctgctgccctcgccccagcagcagcgctggtccctctctctcccctctggatccgcaatattcagtaccatcagcctagcctgcctaatgaagtgagatgtttcatgtgttccctgtgggttagttaatgtcttgccacactcaggatgccagttagggtgtaggtcttccatgcccacaattgcaaagggctcacagttcgcgtgtgccttaatccaccgcggcccgccacgtggcacaagcgtggtctcggaagagttaccgcgagatgatggagccgcaggcctgctggggcggagcggcctcaggacacgcccacagcctttgcagtaactggctgacgcccaccgccttcgcaatgattggccgctggaggtaggcgggatttccgggcacggcttccggcgtccttccctctcagggaagctccagctgtccctcccgcagttggccctgtggtgttccgaagccggttacgtacggcctgagggccaggcgaacctcaggctctttgtcctactaaaaagcgcaggtattttctgtttctctggacagctgggtctctcggcaagaatagaaagcgaaggtttgggattttgtctataaaag

SEQ ID NO: 44998 - DNA, 2300 bp, Homo sapien
aggcccagacaacctgctctgaccaggggctggcactgaagaagtgggcagggggttgggggcggggtgttgttgtgtgaggcgactacttgctcggcgtttctgagctgcaggaggccctcctgtgctgggtgctggacaggctctgctgctgtctgggtgtgccgtctctccttctcctggtctcccctgaggggtgcacgtgtccaccccaggcaaccgctgtgggtagaagtagctacggggctgtgcctggctctccccgtggagctcgagtggtttcaagggagcttatatatactcagggcctaaacatctttgggtgcagcgctggcagagggaagaaattgtgtctggggagatagtgcctgccttgcataggacagcagccccgtgcacagtgacaccgagtcttgagcaccttgtgtttctggggtaagcttgctggacacaggcaaggggagcagggaagttccgtggctggcatgggcatgcagactccccttcctccagggactttcccggtgaatcgtatccttcaactttctgctgttatgatgggtccttggcgctgctattctccctggtgagtgctgtgcttggcttcctgtccctaccacatgccctcagggcacatgcaattaagctgccctcctatccgcatgagcctgttctcagttccccttgttgtcccccatgccctgaatcctggctgaccgccagtgcctaccaccttgtttccccccacctccgctcccgggagctccgcgcccatcccctgctgccaaccatcccgaattggcagctgcaaggatatggctctggcccagaagccggggatgccctgtggcctgggacattcacgtagccgagctccaagtgaaggacgtccagcgagtctgttgctggccggggcgtactggggccagggccaggctgtgcctgcaggtcctcctgctgtggctccacattggccttcctccttggccaccacctccatctctgcaatgatgtcatcccccactagcatgcctctccccgcagggttgtcttcctgctctgtgcacagaccatcctctcctgcacagcctccagccttaacatggtgccctccttgaggctccaacagagcaaagcctgtgcctcccaccccacccccccggcacccgtcaactctgggggcaactccaggagaggcctgcgggccttgccctgctgagaaccacatcctacacctatgtggaacagggttcctggggggccccacagggcccttagcctgtcacactcacactggggctcagatacccagcagggttagctgcgcacggcagccctggagtcggatgccaaggccctggcttccagagccccgctagcaggcacacggccaccactgcacttgtgagagcctctgcaccagcaaagcagtgcacacggatcactgcattggcgaccatggcggtaggcctcccgtgtgcccagggcacaggatgagaagtcctttggaatgcccctgtgagtacagcatcctcagggaggaaccatggaactcggagtatgtatttgcctagacctgacagaatccttgcagggtttcagcttctggtgcagatgaattccacctcagcaacgtaccagtcgactttagtcccacgcacccgccctgccccaatccccccaagccaccgctgctgccctcgccccagcagcagcgctggtccctctctctcccctctggatccgcaatattcagtaccatcagcctagcctgcctaatgaagtgagatgtttcatgtgttccctgtgggttagttaatgtcttgccacactcaggatgccagttagggtgtaggtcttccatgcccacaattgcaaagggctcacagttcgcgtgtgccttaatccaccgcggcccgccacgtggcacaagcgtggtctcggaagagttaccgcgagatgatggagccgcaggcctgctggggcggagcggcctcaggacacgcccacagcctttgcagtaactggctgacgcccaccgccttcgcaatgattggccgctggaggtaggcgggatttccgggcacggcttccggcgtccttccctctcagggaagctccagctgtccctcccgcagttggccctgtggtgttccgaagccggttacgtacggcctgagggccaggcgaacctcaggctctttgtcctactaaaaagcgcaggtattttctgtttctctggacagctgggtctctcggcaagaatagaaagcgaaggtttgggattttgtctataaaag

SEQ ID NO: 44999 - DNA, 2300 bp, Homo sapien
caacgtctaggtaggcctgaggcatcctgcagatccttttggacacttagagatttcgcagtgaattcctgaggctgtgcttgaagtttccttaagctggctgaggtcagcattctcctagcatcatgagattatgctgagggtcccacaaacagtacaagcgaaagtctgtggccgacccacctccgcagatgtttccttctccgctaagccacagggacttgtctctaggcaatggtggcattcattgagacatcagccagagctcacagttcaggtctggtgccctgagactagcgcatgcgcattcacgaggcaaggttgggcgcccggctgtcagagctgtcagcctgcctaaccagaggaaaatggtacagccagagccggcctgttatgggaaaaaaggctgactgcagtaacccactgtgggacactaaaagcgtcgacctcagagctccgtcgggtcgtctccgtggtctggtctcgctgaaggaggacacattttgagactgtgaggaggacgcgggaaactgcttttctcactccatggctgaaagaggctgtgtgtaagaatcaagtcccatgggaattggaatatagtctggtgagtttctgggggtcttcgggtgatggaatcacacctgagaccccagaggcgggtgtctgtggaagatggccgggcccttgatctcactgcctccgttcatcctgccctcacaggggctcttggggaaaggctggaaccatgacaaaaggaggttcaagttgaagaagtgttctcacacctcgaactgacctctcacgggtgcaaatgaggttgagacagtgtctcagaggccgtttgtggagattgcaagcctggaatgttgtccagtagcgctgttgaggggcgatgtggactccccagagaaagcaaagaaaaatcaaagctcgcctgagagaatgagctgactagtgctggagacacagcaatgttaaaagatttctgtcagaagaccctaaagcccctggcaaagtgcaaacaaacttggcccccaaaatgagaccaccacccacaacctggagtgtagccagcctacctaaagtctgttttgctccctgaaattactggcagccaaaagatgtgtggcgataggcagtcccactcagcaagaccacaatgaaagatccactcagcaatgagaagagcctgcagatgaaaagaaacagaagctagatgaccaggcaaaagccaaacacggctgcctacttctcatcctacaggaatcatgcagccttccgaaagaagtgaaagaacaagagtttccttgttggcagctgtaaaggcaatttgcaggtttaaattatcaatgaggcccagtcattaaaacctcacagggtttagaagaaaacactcatgcaatggattcccgtgagggtggttctcgagaattgggaaaatttagtgtggaagtcattgggtggagatccaggaaaccctaggccaatgaggaacatggaagtcaagaaaagaagaggccagtttggaggccacacccctcccagtattaacccattccagttccatttggctatgggtatgaaaaacatacatccagactttgccaggatgggcccaatttgcactcaaaatgttccctgcctgttggattacttccacctgaacaccaggtcatggttggactgcttgtgcaattaacagaatagggggatggggttggaagcaccttctgtgtcatctgtcttcatattttttttgcagttgaaattgcaggacccatccactcctcaccagattgtattctcatccctatctgaccttatttctgctcacactctatgtcccaggatgaaatcccaagacaattgaggagtgcccctttaacctgaagtacctgctcagctagaaaccgaattcaaggtaaattcaattggtcctgaggacaggactgctagtgtcccttgctgggttgaccgtaggacaatgagacactgggagatgtctgttttttggtgtgttggtgtggtgtgttcctcttctttctagaagagtgttttgttttgtttttttgcaggggaaggtgatttagacactgcgtattcatgatccacagaaaaataaaaaaacatggagccccagagcccaagcagagccaaacagacaagcaaccaaaataaaaggtgagggactcaaataaagaggattgaagtgtgttagccacactcttttaagcagactccatttgcaggcacacagacacaaacacacaatgccacacacacacacacacacacagaaa

SEQ ID NO: 45000 - DNA, 2300 bp, Homo sapien
gaggagtgccaagatgcactaaatcacctccacctgaaaaaaaaagccacccttctagaaagaaaaggagcataacacacacacacacacacacacacacacacacacacacacagacatttcccagtgtttcactgtccggcagctaacccagggagagacattagctgtcctgcctgcagagcctattgaatttacctagaattcagttcccagctgagcagttccttcaagttctgagggggcactcctcaatcgtcttgggatttcatcctgggaaatagagtgtgagcagcaataaggtaagacagaggtgagaatacaatcatacaacctcttgaggggaaggttgggtcctgcaacttcacctgcaaaacaaaaatgaaaacagatgacataaaaggtgcttccaactccatccttgcattcccttaattacacaagccgtccacatcttggcttggtgttcaggtgggagtactccaacgtgcaagccacatttggagtccaaaatgaggccatcctgtcaaattccccatttgagggctttcatacccagagccaaatgggagtggaatgtgttgatgttgggtgggatatggcctccagacttgcctcttcttttctttacttccatgttcctcattggcctagggtttcctgggtctggctcaatgacttccgcactaaatgtttccaacttcatggacaacatgcctgatgggaatccattgtgtgagtgtgttcttcttaacactgtcacgttttaatgattgggctgctttgacacttttaaaaccataaattctcactacagccacaaacaaggaaactctttgttttctcacttctatcaaatggctgcatggttcctgtaggatgagaggcaggcagccatgactggcttttgcctggtaatctagcccctgttttatttcatctacatggccttctcattgtggaggggttctttctttggaactggatgggactgcgtctcatcacagattattcagctgaaagtgattgcagagagcaagaggcacttcaggtaggctggctgcactccagtttgtgggttgttctcttattgtggttgctgaggttgtttgcacttagcaggaggttgttgggtcctctcacagaaatcattgaacattgcttggactccagcacaaggcagctcattctcttaggcaagctttgatttctctttgctctcataggaaatcctcagtgcccctcaacagcactactggacatccctatcaccacagatggcctctgagacattgtctcaacctcatctgcacctgtgagaggccagtccgaggggtgagaacactgatccactttggacttgcctttgtcctggttcctgcctttcccagagagcccctgtgaggcccaggatgaagggaggcagtgaagtcaacagcctggccatatttcgacactacaactgcctctggggtctcaagtatgattctatctcccaaagaaccctcaacaacacaccacactatattccaatcaccatggacctgagtcttgcacacagcttctttcaagaatggagtcagaaaagcagttatcagcaacgacctcacagtcgtgaattgccttgacctccagcgtgacccgaccacagagatgactcgaaggggccctaagatcaagactttcagggtttcccagtgggttttcgtaggcggactttttcccgatatcaggcaggctctgccggtaccattttcctctgcataggcaggctgacatctctgacagcctagcgtgggcgcctccatcgcgaatgcgcatgcgctagtcttagggcacggggcctgagctgtgagctgtggttaacatcccaataaatgcctccgttccctagccacaagtccctgtggctcgacttagaaggacaccttggtggaggtgcgtcggcagtggtctcttgcctgccttatctgtgggatccatgggatagtcccatgttcctaagagaggtcagacgtgagcagcctgaagaaacctcaagcagagcccaaggaataaatcacgaaatccctaaggatctaaaaggatctgcatgatgcctcagacctgcctagatgttgtaggggtgagtcttttcgaaatttgccctactgtgatttattggtacagccctcctgtattcccaaagatgctgtctcccaagtggggctgtctgcagaaccatgcagcctcagaagctactgggctgtgtgattctgtgagagtgttgcaattgttgggtatctgcctgtgtgtggctg

SEQ ID NO: 45001 - DNA, 2300 bp, Homo sapien
caggcccagacaacctgctctgaccaggggctggcactgaagaagtgggcagggggttgggggcggggtgttgttgtgtgaggcgactacttgctcggcgtttctgagctgcaggaggccctcctgtgctgggtgctggacaggctctgctgctgtctgggtgtgccgtctctccttctcctggtctccctgaggggtgcacgtgtccaccccaggcaaccgctgtgggtagaagtagctacggggctgtgcctggctctccccgtggagctcgagtggtttcaagggagcttatatatactcagggcctaaacatctttgggtgcagcgctggcagagggaagaaattgtgtctggggagatagtgcctgccttgcataggacagcagccccgtgcacagtgacaccgagtcttgagcaccttgtgtttctggggtaagcttgctggacacaggcaaggggagcagggaagttccgtggctggcatgggcatgcagactccccttcctccagggactttcccggtgaatcgtatccttcaactttctgctgttatgatgggtccttggcgctgctattctccctggtgagtgctgtgcttggcttcctgtccctaccacatgccctcagggcacatgcaattaagctgccctcctatccgcatgagcctgttctcagttccccttgttgtcccccatgccctgaatcctggctgaccgccagtgcctaccaccttgtttccccccacctccgctcccgggagctccgcgcccatcccctgctgccaaccatcccgaattggcagctgcaaggatatggctctggcccagaagccggggatgccctgtggcctgggacattcacgtagccgagctccaagtgaaggacgtccagcgagtctgttgctggccggggcgtactggggccagggccaggctgtgcctgcaggtcctcctgctgtggctccacattggccttcctccttggccaccacctccatctctgcaatgatgtcatcccccactagcatgcctctccccccagggttgtcttcctgctctgtgcacagaccatcctctcctgcacagcctccagccttaacatggtgccctccttgaggctccaacagagcaaagcctgtgcctcccaccccacccccccggcacccgtcaactctgggggcaactccaggagaggcctgcgggccttgccctgctgagaaccacatcctacacctatgtggaacagggttcctggggggccccacagggcccttagcctgtcacactcacactggggctcagctacccagcagggttagctgcgcacggcagccctggagtcggatgccaaggccctggcttccagagccccgctagcaggcacacggccaccactgcacttgtgagagcctctgcaccagcaaagcagtgcacacggatcactgcattggcgaccatggcggtaggcctcccgtgtgcccagggcacaggatgagaagtcctttggaatgcccctgtgagtacagcatcctcagggaggaaccatggaactcggagtatgtatttgcctagacctgacagaatccttgcagggtttcagcttctggtgcagatgaattccacctcagcaacgtaccagtcgactttagtcccacgcacccgccctgccccaatccccccaagccaccgctgctgccctcgccccagcagcagcgctggtccctctctctcccctctggatccgcaatattcagtaccatcagcctagcctgcctaatgaagtgagatgtttcatgtgttccctgtgggttagttaatgtcttgccacactcaggatgccagttagggtgtaggtcttccatgcccacaattgcaaagggctcacagttcgcgtgtgccttaatccaccgcggcccgccacgtggcacaagcgtggtctcggaagagttaccgcgagatgatggagccgcaggcctgctggggcggagcggcctcaggacacgcccacagcctttgcagtaactggctgacgcccaccgccttcgcaatgattggccgctggaggtaggcgggatttccgggcacggcttccggcgtccttccctctcagggaagctccagctgtccctcccgcagttggccctgtggtgttccgaagccggttacgtacggcctgagggccaggcgaacctcaggctctttgtcctactaaaaagcgcaggtattttctgtttctctggacagctgggtctctcggcaagaatagaaagcgaaggtttgggattttgtctataaaag

SEQ ID NO: 45002 - DNA, 2300 bp, Homo sapien
caggcccagacaacctgctctgaccaggggctggcactgaagaagtgggcagggggttgggggcggggtgttgttgtgtgaggcgactacttgctcggcgtttctgagctgcaggaggccctcctgtgctgggtgctggacaggctctgctgctgtctgggtgtgccgtctctccttctcctggtctccctgaggggtgcacgtgtccaccccaggcaaccgctgtgggtagaagtagctacggggctgtgcctggctctccccgtggagctcgagtggtttcaagggagcttatatatactcagggcctaaacatctttgggtgcagcgctggcagagggaagaaattgtgtctggggagatagtgcctgccttgcataggacagcagccccgtgcacagtgacaccgagtcttgagcaccttgtgtttctggggtaagcttgctggacacaggcaaggggagcagggaagttccgtggctggcatgggcatgcagactccccttcctccagggactttcccggtgaatcgtatccttcaactttctgctgttatgatgggtccttggcgctgctattctccctggtgagtgctgtgcttggcttcctgtccctaccacatgccctcagggcacatgcaattaagctgccctcctatccgcatgagcctgttctcagttccccttgttgtcccccatgccctgaatcctggctgaccgccagtgcctaccaccttgtttccccccacctccgctcccgggagctccgcgcccatcccctgctgccaaccatcccgaattggcagctgcaaggatatggctctggcccagaagccggggatgccctgtggcctgggacattcacgtagccgagctccaagtgaaggacgtccagcgagtctgttgctggccggggcgtactggggccagggccaggctgtgcctgcaggtcctcctgctgtggctccacattggccttcctccttggccaccacctccatctctgcaatgatgtcatcccccactagcatgcctctccccgcagggttgtcttcctgctctgtgcacagaccatcctctcctgcacagcctccagccttaacatggtgccctccttgaggctccaacagagcaaagcctgtgcctcccaccccacccccccggcacccgtcaactctgggggcaactccaggagaggcctgcgggccttgccctgctgagaaccacatcctacacctatgtggaacagggttcctggggggccccacagggcccttagcctgtcacactcacactggggctcagctacccagcagggttagctgcgcacggcagccctggagtcggatgccaaggccctggcttccagagccccgctagcaggcacacggccaccactgcacttgtgagagcctctgcaccagcaaagcagtgcacacggatcactgcattggcgaccatggcggtaggcctcccgtgtgcccagggcacaggatgagaagtcctttggaatgcccctgtgagtacagcatcctcagggaggaaccatggaactcggagtatgtatttgcctagacctgacagaatccttgcagggtttcagcttctggtgcagatgaattccacctcagcaacgtaccagtcgactttagtcccacgcacccgccctgccccaatccccccaagccaccgctgctgccctcgccccagcagcagcgctggtccctctctctcccctctggatccgcaatattcagtaccatcagcctagcctgcctaatgaagtgagatgtttcatgtgttccctgtgggttagttaatgtcttgccacactcaggatgccagttagggtgtaggtcttccatgcccacaattgcaaagggctcacagttcgcgtgtgccttaatccaccgcggcccgccacgtggcacaagcgtggtctcggaagagttaccgcgagatgatggagccgcaggcctgctggggcggagcggcctcaggacacgcccacagcctttgcagtaactggctgacgcccaccgccttcgcaatgattggccgctggaggtaggcgggatttccgggcacggcttccggcgtccttccctctcagggaagctccagctgtccctcccgcagttggccctgtggtgttccgaagccggttacgtacggcctgagggccaggcgaacctcaggctctttgtcctactaaaaagcgcaggtattttctgtttctctggacagctgggtctctcggcaagaatagaaagcgaaggtttgggattttgtctataaaag

SEQ ID NO: 45003 - DNA, 2300 bp, Homo sapien
gatgcccactgccttcccaatgattggctggaggtaggcgtgatttccgggcatggcttcccactcaggccagctgcagcggtctttcctgcagttggccctgtggtgtcccgaagccggatgcatacgacctgagtgacgggagaccctgaggctgtttgtcctcctgaaaagcacctgtattttctgtttctctggacaggttggtctctcggcaagactagaaagcaaaggtttgggattttgtctataaaagcgaatgggctttctatatgtgggcttgaattaagggaggagacagtggggagagaactccttagtgctctaaagaaactcatttttgttaaactctttgatttttcttgaagattctacctttaactgtcggacatatctgacatgtgggcaagttctgggagatggtgctaaggcgccattgttttcatgggcactttttattaaagcagtttttctctgtgaatgtcgtcataattcaaaatacaggcaacatacttaaccactgcgattaaaaacccgtactttagtcagcacatgtcacatatgtgatttgcttggcgggaattatcaaattttgacgtattttagtgtatgtagaagtctggggccataaataacctcggtttaaatttgcctctgtaaagcctgtaattgtctccttccttgtatgacagtatttgaaacatgtttcatgtatctgtggcacctaagtaatttaaaccgaataagtgggtgtaatggagttaaatggagttggatagacttaaacgaaaacaaaataaatctgcttgttattctactatcttcacacactgacttacttttgtaatcctagcattttgggaagtgcaggtaggaggatggcttgaggtcaggagttggagaccagcctgaataacataatgggctcctttactctattgccattttcgcaccagggaccggttggtggaagacaatgtttcctcagacaagtgttgcccagcggaagaaggcagtgagatggacacgtttaggggtacgggctggcggcagggccccgaggggcacgtggtggggcggggcttctggtggaagaggtgtgagagggggcaggtggggcagtggggctgtcaccgggacagggtggggcaggaggggtgggaggcggctagggaggtttccggatgaaactgtgccacctcaggtcatcctcaggcgttacattctccacagacaggtattacaggttatcctcaggcattacattcaggccacagacaggtatggcgtgaaggccagtgtttggggatccttgatctattatatatttcaaatcactaaaagatgctaaaatacttaaaatgatctccccctagaacattttaattagcttgatttaatctttcatacaaatatcacgctgggtgtggcggttcacacttgaaatcccatcactttggtagtcccaggccagtggactgcttgagcccaggagttggagaccagtttgggcaatataaggaaaaccatgtctatttaaaaacaaacaaacaaacaaaaaaaacacacacacacaaaaattgcccagccagctacttgggaagctgaagcgtgggaggatcagttgagtctgggtggaggaggctgtagtgagcagtgcactttagcaacaggagatatacatctcaagaaaaaaaaatacacaaaacatcacaccatacctcataaatatatagttttcaaataaaattatttaactgggagcatccttcatattgcaacttaggaaaattacagtagcttttcttatctaatttttataaattagattttgtcacctacataataaaatgcagcatttgtccatgaagtcagtgccccttttgctctgtatgttatgaattttacatatttaaactaagaaatactaaaaagatgttagcctctggaagggacttttacttgaatttccaacacagtatgtaataaaattttatctttttagtttgtctatttttatctaatatagattttttttaaccatttacagcacaatggtagaagcagattgtcatggcaagcttttcattggtggcctcaatagagaagccaatgaaaaggtgcttaaagaagtatttgcaaaacatggtccccttttggaaggtaactcttaaagccatgtgttttgtgtgtgtgcgtgtctctgtttgtgtgtattttcgtatgtatatttcaatatgttatttaaaatatgtaggttatgtatgtattttaaagtatgtatttttcaaagttcattg

SEQ ID NO: 45004 - DNA, 2300 bp, Homo sapien
gagtactttaacctgcaaggaatatttggagggcaaattggggccatttttgcaaactctccatttaagagccttcatacatgagccaaatgggagcagaattgattgattctgtattggatgtggcctccgtacttgcctcttttcccctgacttctacgtttctcgtcaacctagggtttcctgtttctggctcaatgacttccacactacatgtttcctagttcacagagaacgaccctcctgggaatccattgcatgagtgtttccttctaaacattgtcaccttttaaagactgggaagctttgatagttttaaaacggtaaattcttgttacacccaccaacaaggaatctgttttttttcccacttctatcacagggttgcatgtttcctctaggatgagaaggaggcagccatgtctggctttagcctgataatctagcccctgtttcatctcatctgcatggacttctcattgtggaggggccctttcactgggctgttgctggctaggactgccacttgccacagattattttgctgccagggatttcagagagtaaaagggactttgataaactggctgcactccatattgtggatcattgtctcatcgtagaggctgcagttgtttgcactttgcaggaggcttttggtttctgacaggaatcttgaacattgcctggactccagcaaaggcagctcattcttaggtgaaccttggtttttctttgttttcttggggaatccatagtgccccccaacagcagcactgcacaccattttcaagcttgccatcaccacagatggcctctgagacactgtctcaactacatctgcacaagtgagaggccattccgagatgtgagaacactgctccacattagacttgcctttgttatggttcttgcctttcatagatagcccctgcaaggctcagaatgaagggaggcattcagttcaaaagcccaatcatcttttgctgacatccacttctggtgtctcaggtatgtttctgtcgcccaaagaacactcaacgacacaccagattatattccaacccccttgggacccaattattgcacacaccctctttcgctaatggagttagaagagcagtttccagcgaccacatcgcagtcgcgaaacacctcttcctccagcgggacctgaacaaggaaatggccagcagggtccctgaggtcgagattttcagggtcctgcagtgggtttttatagtcagcctttttcccgataccaggcgggctctgcctgttccattatcccctgctgaggcagactgacagctctgacaacctgacttgagtctgcctcacaaatgcgcatgcgctagtctcagggtacctgatccgattgtgagctctgtctagcatcgctataaatgtcaccgttgcctagcaagaagtatctgcatcttggaaaaggggacctccgtggaggagcgtcagctgtgtcttctcgtctgtcttctctgtgaaatccacggatagtctcatgatcctaggagagggtagacgttagccagcgtgaagaaacaagcatagctacaggaataaaccacaaaatccttaagcatccagaaacatctgcaagatttggtaggcctgcctagacattgtacgggtgaatctttttgaaacttgccctactgtggtttctaggtacagcctgcctatgttccttggggttgctctctcctaggtgggaattcctgcagagccatgcatcctcatgcactgctgagctatgtttttctgtgggagtgttgcaactgttggatgtgtgtgtgtgtgtgtgtgtttttcattgtgtgtttaagaatgtgtttgttgctgtaagtggagtctgcttaaataatgtgtctaatgcacttcagtgcctcttttttttttttttttgaatgtttcaatctttgttggcctctctgttgctttgtttgtgctgtggggctccgtgttctttatttttctgtggatcatgaatctgcagtgaatcgggaggtgggccaagacatgcaggtgtcaaaatcaactcctcctgaaagaaataaaacaaaaaagagccactcttctagaaagaagaggagcacaccacaccagaaacagacatcttgcagtgtttcactgtctcaaccttatctgcacagtccgaggtcagtctgaggtaagagaataaccacaactgcatagtgaaagaccagtctgaggtatgagaacactcctccacctcggacttgccattgtcgtggtttctacctttcccagagagcttctga

SEQ ID NO: 45005 - DNA, 2300 bp, Homo sapien
aattggggccatcctggcaaactcctgatttgagggctttcattgctgtagccaaatgaaagtggaatcgattgatgctgggtgcaagccagcctaaagaaacatcaagcagagccccaggaataaactgtgaaatccctaaggatccaaaaggatctgaaaaaggcctcaggccttcctagacattgtagcagttagtctttttgaaacttgccacactgtgatttctagtttcagccagcctgtgttccttaggcattgtctcttccaggtggggcttcctgcagaaccatgcagcctcagaagctgctgggctgtgtgtttctgtgggagtgttgtgagtgttggggtgtgtgtgtgtgtgtgtatctgtgtgcctgtaagtggaatctcttaaaggaatgtggctattgccctaaagcacttcttatttttgagactcctaacttttggtggcctgtctgtgtggccttgcttggtctatgggattacaacttcttcatttttttgtgtggatcatgaatccacagtgaactgggagattggctgagacatgccaaagttaaattatgtcccactgcaaaaaacaaaacaaaacaaaaccctcttctaggaagaagaatagcaaaccacacccaagagcagacatctcccagtgtttcatgttctgcagcaaacccagggagagacactggcagtcctgttctcagggccccttgaatctaccgcaaatttgattcccagctgaacacgtgcttttcatcacaatgggacaatcctccattgtcttgggattttattcttggacacagagtacgagcagtaataaggtcacataggtttgaagatacagtctggtaaggggtggttggagtcatgcatattcgcctgcaaaaatggtgaagacagattacactgtcacaatttaatgactgggcatctgtaatacatttaaaaccataaattcctgttactgacaccaacagggaaactcttgttctccctcttctgtcggatgggtgcatgattcccataggatgagaagcatgcagtcatgtctggcttttgcctggtaatctgtggtctgtttcatttccactgtaggtcctttctcattgtggagagggtcattcagccattgctggatgcgactgccactcaccacagatcttttggctgccagcgattttagggagcaaaatggccttcaggtaggctggctgcacttcaggttgtgggtcgttgtctcattgtggaggctgaggttgtttgcacttctgaggaagcttttaggtactctgacaggagtatctgaatgttgcttggactccagcaaaagtcagctcattctctcgggtgagccttgagttttttgtgctttcatggggtgtcgccattgccccacaacggcactattggacgcagttttcaggcttgcaatagccacagacagcctctaagacaatgtgtcaacctcatctgcatccctgagagggaagttcaaggtgtgagaactctgatccatcttagacttgcatttgttgtggtttatgcctttcccagagagcccctgggggacccagaatgaagagaggcagtgaggacaggggtttggccatatttcactgacaaccacctctggggtctcacttatgattccatgacacaaagacccctcaacaactcaccagactctattccaatccctatgggacctgattcttacaaatagcctctttcaagaatgaagtcaaaagagcagttttgcatgacagcctaacagtctcaaaacacctcttcctccagtgggacccgaccaaggagatggatggaaggggtcctaaggttgacttatttagggtcccccagttggttatcacaggcagcctttctcctgatatgaggccggctctgcctataccattttcctttgcttaggcagaatggctgctctgacagctgagcccctgggcctgccttgcgaatgtgcatctgctagcctcagggcaccacccctgagctgtgatctttggcttgcatcacaatcaataactctttgcctagtgaaaagtccctgaggcttggcagagaaggagacctccgtgaagatgcatcatggtggactgtggtctcttctctgtggaatcctcgggagagtcccatgatcctaggagagggtgagagggcagatgtaagccagcattaagaagcctcaagcagagccgcaggaataatccgtgaattccctaacaatcctaaaggatctgcaggatgcttcaggcctgcctagatgttgtagg

SEQ ID NO: 45006 - DNA, 2300 bp, Homo sapien
caggcccagacaacctgctctgaccagggactggcactgaagaagtgggcagggggttgggggcggggtgttgttgtgtgaggcgactacttgctcggcgtttctgagctgcaggaggccctcctgtgctgggtgctggacaggctctgctgctgtctgggtgtgcggtctctccttctcctggtctccctgaggggtgcacgtgtccaccccaggcaaccgctgtgggtagaagtagctacggggctgtgcctggctctccccgtggagctcgagtggtttcaagggagcttatatatactcagggcctaaacatctttgggtgcagcgctggcagagggaagaaattgtgtctggggagatagtgcctgccttgcataggacagcagccccgtgcacagtgacaccgagtcttgagcaccttgtgtttctggggtaagcttgctggacacaggcaaggggagcagggaagttccgtggctggcatgggcatgcagactccccttcctccagggactttcccggtgaatcgtatccttcaactttctgctgttatgatgggtccttggcgctgctattctccctggtgagtgctgtgcttggcttcctgtccctaccacatgccctcagggcacatgcaattaagctgccctcctatctgcatgagcctgttctcagttccccttgttgtcccccatgccctgaatcctggctgaccgccagtgcctaccaccttgtttccccccacctccgctcccgggagctccgcgcccatcccctgctgccaaccatcccgaattggcagctgcaaggatatggctctggcccagaagccggggatgccctgtggcctgggacattcacgtagccgagctccaagtgaaggacgtccagcgagtctgttgctggccggggcgtactggggccagggccaggctgtgcctgcaggtcctcctgctgtggctccacattggccttcctccttggccaccacctccatctctgcaatgatgtcatcccccactagcatgcctctccccgcagggttgtcttcctgctctgtgcacagaccatcctctcctgcacagcctccagccttaacatggtgccctccttgaggctccaacagagcaaagcctgtgcctcccaccccacccccccggcacccgtcaactctgggggcaactccaggagaggcctgcgggccttgccctgctgagaaccacatcctacacctatgtggaacagggttcctggggggccccacagggcccttagcctgtcacactcacactggggctcagctacccagcagggttagctgcgcacggcagccctggagtcggatgccaaggccctggcttccagagccccgctagcaggcacacggccaccactgcacttgtgagagcctctgcaccagcaaagcagtgcacacggatcactgcattggcgaccatggcggtaggcctcccgtgtgcccagggcacaggatgagaagtcctttggaatgcccctgtgagtacagcatcctcagggaggaaccatggaactcggagtatgtatttgcctagacctgacagaatccttgcagggtttcagcttctggtgcagatgaattccacctcagcaacgtaccagtcgactttagtcccacgcacccgccctgccccaatccccccaagccaccgctgctgccctcgcccctgcagcagcgctggtccctctctctcccctctggatctgcaatattcggtaccatcagcctagcctgcctaatgaagtgagatgtttcatgtgttccctgtgggttagttaatgtcttgccacactcaggatgccagttagggtgtaggtcttccatgcccacaattgcaaagggctcacagttcgcgtgtgccttaatccaccgcggcccgccacgcggcacaagcgtggtctcggaagagttaccgcgagatgatggagccgcaggcctgctggggcggagcggcctcaggacacgcccacagcctttgcagtaactggctgacgcccaccgccttcgcaatgattggccgctggaggtaggcgggatttccgggcacggcttccggcgtccttccctctcagggtagctccagctgtccctcccgcagttggccctgtggtgttccgaagccggttacgtacggcctgagggccaggcgaacctcaggctctttgtcctactaaaaagcgcaggtattttctgtttctctggacagctgggtctctcggcaagaatagaaagcgaaggtttgggattttgtctataaaag

SEQ ID NO: 45007 - DNA, 2300 bp, Homo sapien
ttctttctttttttccctcttttctttacctctttctctctctctctctctctttcttttctctatctctgtatctccctttgattttttttttaggtagactcctgctctgtcacctaaggtggagtgcagtggcatgatcttggctcactgaaacttccccatcctgggttcaagcaattcttcagtcacaccctcccaagtagttgtgactgtaggcctgtgacataaatcctggcgcatatatatatatatatatatatatatatatttttttttttttagtagagagcaggtatcacaatgtttgcttaggctggtctcaaatgcttgtcctcaagtgatccacccacctcagcctggcaaaatgctgggatgtcaggcatgagccacagtgcccacccagttttatgcatttctctcctcagtgatctctcctattttattattttattttacttttatttttgagacagagtcttgctctggtgcccaggctggagcacagtggtgtaatctcagtacatggcaaactccatcactgggattcaatggattctcctgcatcagcctcctaagtagctgggataacatccatgggccaccaagcccagctagctttggtatgatattagacatgggatcttgctatgttggccaggcttgtctcgaactcctgacatgaagagatctgcccaccacggcctgccaaactgctgggagtgcagcctccatgccctacctcatatctgttctaaacctcagttgataagcaatattgtcttcctggaatgctttatgtttacaaaacaactacagtactattatttagccccttcaggtaaaatatggtaacatagaaaacatatacacacagacacagacacaggcagtgatcaaaatatgagggtaggccaggatgtaaaatgaaagatgtgttgctgcagttgactagaattaaaccagaccagagctgacccttacccagataagagatgtgaacagaagctttcaaaaaactctatcagttgcatgttagattattctccagccatagcaaagggacattaaagatctgttgtgtttagaagagtcttgatagtttgacttttccagggtagcattcgtgacattggcctttaaagctctccacaattactcaattactcaaatcagtagacaactcaattatccaaggagtctgaagtgctttttaaaattatgtaaaacttagtggcttaaaacaataattatagttatcctaggagtctgaagtgctttttaaaattatgtaaaacttagtggcttaaaacaataattataatttactatcagtctctgcaatcttccacagtctctcagccaaatgattgtggttcagggtcactcaggaggatgcaatctagtgatggctcaggatggggacattgtccggtgtcttctcgtctccctggtgccatggctaggttgactcaaaatagtgggggctggcctgctgagatcttcaggcatctcctatttctttttcttttttctttttttctttttttgagatggagtcttgcactgttgctcaggctggagtgcagtagtgccatcttggctcactgcaaattctgcctcctgggttcagggttcaggccattttcctgcctcagcctcccaagtagctggaactacaggcgcctgccacaaagcccagctaattttttgtacttttagtagagatggggtttcactgtgttagccaggatggtcttgatctcctgaccttgtgatccatccacctcggcctctcaaagtgctgggattacaggtgtaagccaccgtgctggccttccttctatttctgtgagtctctccatgggatgtcctttcagcatagtgttatcagggtgttagactttgtgatgtactggttgggggctcctgaggggtttgtcccatgagagcaggagatttagttagagctgtgtcaccttttctaacctaggccagaggtgtcccagtatccagagaaggcttgcactgttttctattcattagcagcaagtactgtattcagtaccaccaggaatattttcaaatgggtttgtggagaatgtgactgagaccactacaatggccatgcctaataattacttatttttataagtgctggatgcgttttacccaacataatagcagatacagacttttaagcttaaaacctaaatgtcatagctccaaacatttggttgtatgttgaaataactctcaagcaaaaattgattttgaaacgagagctgtaaataaataaa

SEQ ID NO: 45008 - DNA, 2300 bp, Homo sapien
gcccagacagtctactctgaccagaggcaggcacagaagaagtggggagggggttgcgggaggggtgttgtggtgtgaggcggctactttctcagggttcctgagctgtgggaggccctcgtgtgctgggtgctggacaggttctgctgctgtccgggtgtgcggtgtcctcttctcctggtctcactgaggggtgggcctgtccacccgagggaaccgctgtgggtagaagttgctgcagggctgtgcctggctctccccgtgagactcgagtggtttcaacggaggttatatatgctcagggcctaaccatctttgtgtgcagcgctggcagagggaagaaatcctgtctggggagctggtgcctgccttgcagaggacagcagtcccatgcactgtgaacccgagtcttgaggaccttgtgtttctgaggtaagcctgctggacataggcacggggagcaggggtagttccctggctggcctgggcacgcagactccccttccttcagggattttcccagtgaaaagtgtccttcgactttctgctgtttatgacgggtcctttgagctgctattctcccttgtgagtattgtgcttggcttcatatccctacctcgtgcccgcaggggacacggaattttgctgcccttctatctgcatgagtctgtccttggttcctctcattgtcccccataccctgaatcctggctgagctccggtgcctaccaccttgtttcccccaaccccgctcccgggagctcggcgcccacccactgctgccagccatcccgaattgacagctgcaaggatatggctctggcccagaagccggggatgtcccgcggcctggggcatttaccgagcccagctccacgtgaaggacgtccagcgagtccgttgccggcgggggcatactagggccaaggccaggctgggcctgctgggcctcctgctgccgctccacattggcctcctccttggccaccacctccatctctgccatgatgtcatcccccactggcatgcctcttcccccagggttgtctccctgctctccacacaggccgccctcttctgcagagcctccaccttaacacgatgccctccttgaggcttccactgactaaggcctgcaccgcccatctcacgtccctggcacccctagaccctaggggaatctgccggaggggcccccgggccttgccctgctgagacccatgtcccacacctacgtggatgcagggttcccggggagcccctcagggcccacagctcgccccactcgcaatgcggcccagacacccagcagggttagctgcacacagtagccctggagttggaggccgacgccctgggcttccagagccccgctagcaggcaggacggccactgctgcccttgcgggagcctctgcgccaggaaggcagtgcacacgggtcatcggattggcgaccatggtggctggcctcccatgtgcccacggcacaggatgagaagtcctttggaatgcccctatgagtacagcatcctcagggaggaagcatggaactcagagtctgtatttggctagaccttagagagtccttgtggggtttcagcttctattgcagacaaattccaccccagcaacgtaccagtcgactttcctcacaggcaaccgccctgccccactcccctcaaaccaccgccgccgccctcaccccagcaggcagcgctggtccctctctctcccctctggatctgcagtatttagtaccatcagcctagcctgccttacgaagtaagatgtttcatgtgttctttgtgggttaattaatgtcttgccacactcaggatgccagttagggtgtaggtcttccaagcccacaattgcaaagggctcacagttcgcctgtgcctcaatctaccgctgcccgccacatggcacaagcgtggtctcggaagagttaccgcgacataatggagctgcaggcccgcaggggcggaggggcctcaggactcgcccacagcctttgcagtaactggctgacgcccaccgccttcgcaatgattggccgctggaggtaggcgggatttccgggcacggcttccggcgtccttccctctcagggtagctccagctgtccctcccgcagttggccctgtggtgttccgaagccggttacgtacggcctgagggccaggcgaacctcaggctctttgtcctactaaaaagcgcaggtattttctgtttctctggacagctgggtctctcggcaagaatagaaagcgaaggtttgggattttgtctataaaag

SEQ ID NO: 45009 - DNA, 2300 bp, Homo sapien
caagaagcagaagcccttcaggatgtctgagatctgcaagaggaagtagtggaggaacaagaggatggcatccctcacatgaaggacgcttgggtaatgttttaaaatgtaaagatggaaccataggactgaaagaaaataagtttgaagatatcgaaatttctcaattatatttatttcctttatgaacagaaaattgacttataataagcaaacttatttctaagtactaaaggtgtattacaagaatgattgaagtaatatctaaaatttgttgtaaaattgtaataacgttggattgaaataacacaaatttcaaactgatttgattttatgaatgccaattgctgctactcaacaggttttctgcagaactcatttatattcatcatactttagagttttctactttggggcccagaacttcatatcagttgtattatcaaagtaagcaatatttaaaactttccaacagggaaaagtaactcagtacttaagattgattttgcaatatttgttttcttgtatatatgtgtgcaaacatctatgcaaatgtattgctttgtaattttgatacagagagtttgtacattggcctgccataaagcattttcaatttaagaaatgtagaactttaacttctgcaaagagtctgtgactctgaaaaggtctaaaaaccactgcttcacatatatgtatgtatctttgtttgctggaggataagacactgaaaatgatatttatagtgatttacacaatagaaatgaggggtcaatttttacataaaaaagaaaaaccacgtattttttaaaaaagaaaaaactattggatgggctgggtttagtaactcatgcctgacatctcagcacttcaggagtacggagcaggtggaccatgaggtcaggacttccagaccagcctggtcaacatggtgaaaccctgtctctcctaaaaatacagaaaattagcctggcatggtggcatgcacctgtaatcccaactactcagctgaggcaagaaaatcgctggaacctgggaagtggaagctgcagtgagccgagatcaggccattgcactccagcctgggcaatagggcaagagtccatctcaataaataaataaataaataaataaataaataaatacctatcggttaacttgtattatctattaactaaccttcaataatctaacatttaacttggagttttaataaccagatgtgtaattaattggagatttttttaagtggaaattgcagtgtttgctccattttaagatgcatagctacatggttattttgtctccattgcttttgagggtgaagttcaacaacactccaccatgtctgagaatgtgtgtattctaacctgtaacaccacctatgttatgtatgtagatatattgccgcatatctacattttttgtagatatataaaaatctttatatattatttaatatgcaattcttaatgactattaaaatttagcatagtgtaatctgaaaattagtgtttcataagggaattgtaagaattctatattatgttaacaaattttagagataatgtattttcctgatgtgtcactttttgatatcataaatatttgaatttgtttgaatggaatttagtttatctttatgacatgctttgaaaatttttcctcaaaacacaatgatataaacagtcatttatcatttttcttttaatattttatgtctattatacttagatattttagtgatagatttctgctccctgttcactccccaatttgtcttcatctctctctcacaccaatatattatgattcttgagtttctttctagattttctcaacagacttttattgcttgaactgtacttatttcatatagaaatgttaattttattagcttagacaaatatgaatttataagatgataatatgtagataatctttataaacaactaaaacttagccatttaagaaacagtgatgttagttaactgaaaagattttgtttgaaatacagatgatgatgcatactctcttgatctcaacacgagttcttctaggcaacccattctagttaaaagaggtccctcttcaaaaagtggaggtcctcctcctaaaaagtctgctccttctgctgtggtaagaagcaataattggatgagaggccaaggtaaatgctatctgatagaaagactgtagtttttgtatgactaaaaatgagctattttacctggatgcttaactttaagttcactgaacaaaggagaagtgacacatacatgggcataattactgatcga

SEQ ID NO: 45010 - DNA, 2300 bp, Homo sapien
tgctctgaccagggactggcactgaagaagtgggcagggggttgggggcggggtgttgttgtgtgaggcgactacttgctcggcgtttctgagctgcaggaggccctcctgtgctgggtgctggacaggctctgctgctgtctgggtgtgcggtctctccttctcctggtctccctgaggggtgcacgtgtccaccccaggcaaccgctgtgggtagaagtagctacggggctgtgcctggctctccccgtggagctcgagtggtttcaagggagcttatatatactcagggcctaaacatctttgggtgcagcgctggcagagggaagaaattgtgtctggggagatagtgcctgccttgcataggacagcagccccgtgcacagtgacaccgagtcttgagcaccttgtgtttctggggtaagcttgctggacacaggcaaggggagcagggaagttccgtggctggcatgggcatgcagactccccttcctccagggactttcccggtgaatcgtatccttcaactttctgctgttatgatgggtccttggcgctgctattctccctggtgagtgctgtgcttggcttcctgtccctaccacatgccctcagggcacatgcaattaagctgccctcctatctgcatgagcctgttctcagttccccttgttgtcccccatgccctgaatcctggctgaccgccagtgcctaccaccttgtttccccccacctccgctcccgggagctccgcgcccatcccctgctgccaaccatcccgaattggcagctgcaaggatatggctctggcccagaagccggggatgccctgtggcctgggacattcacgtagccgagctccaagtgaaggacgtccagcgagtctgttgctggccggggcgtactggggccagggccaggctgtgcctgcaggtcctcctgctgtggctccacattggccttcctccttggccaccacctccatctctgcaatgatgtcatcccccactagcatgcctctccccgcagggttgtcttcctgctctgtgcacagaccatcctctcctgcacagcctccagccttaacatggtgccctccttgaggctccaacagagcaaagcctgtgcctcccaccccacccccccggcacccgtcaactctgggggcaactccaggagaggcctgcgggccttgccctgctgagaaccacatcctacacctatgtggaacagggttcctggggggccccacagggcccttagcctgtcacactcacactggggctcagctacccagcagggttagctgcgcacggcagccctggagtcggatgccaaggccctggcttccagagccccgctagcaggcacacggccaccactgcacttgtgagagcctctgcaccagcaaagcagtgcacacggatcactgcattggcgaccatggcggtaggcctcccgtgtgcccagggcacaggatgagaagtcctttggaatgcccctgtgagtacagcatcctcagggaggaaccatggaactcggagtatgtatttgcctagacctgacagaatccttgcagggtttcagcttctggtgcagatgaattccacctcagcaacgtaccagtcgactttagtcccacgcacccgccctgccccaatccccccaagccaccgctgctgccctcgcccctgcagcagcgctggtccctctctctcccctctggatctgcaatattcggtaccatcagcctagcctgcctaatgaagtgagatgtttcatgtgttccctgtgggttagttaatgtcttgccacactcaggatgccagttagggtgtaggtcttccatgcccacaattgcaaagggctcacagttcgcgtgtgccttaatccaccgcggcccgccacgcggcacaagcgtggtctcggaagagttaccgcgagatgatggagccgcaggcctgctggggcggagcggcctcaggacacgcccacagcctttgcagtaactggctgacgcccaccgccttcgcaatgattggccgctggaggtaggcgggatttccgggcacggcttccggcgtccttccctctcagggtagctccagctgtccctcccgcagttggccctgtggtgttccgaagccggttacgtacgcctgagggccaggcgaacctcaggctctttgtcctactaaaaagcgcaggtattttctgtttctctggacagctgggtctctcggcaagaatagaaagcgaaggtttgggattttgtctataaaaggggatgggttttctat

SEQ ID NO: 45011 - DNA, 2300 bp, Homo sapien; identical to SEQ ID NO: 45005

SEQ ID NO: 45012 - DNA, 2300 bp, Homo sapien
agaggctgtgtgcaagaatcaggtcttatggggattggaatgtagtctggtgagttgaggaggggtgtttgggtgatggaattatacctgagaccctagaattgggtgtctatgaatgatggttgggcccttaacctcactgtctcccatcattctggacctcgcagggtctctctgtgaagcacaggaaccaagacaaaggcaagtccaaaatggagcagtgttctcaaacctcaaactggcctctcatgggtacagataaggttgagacagtatctcagaggccatctgtggccatggcaagccagaaaagggtgtccagtagtgctgttgaggggcactgtggacttcccaggaaagcaaagaaaaatcaaggtgtgtgtgtgagaaaaagatggcttgtgctggaatctaagcaatattcaaaaattcctgtcagagaactcaaaagcctccttcaaagtgcaaacaacccataacgagacagcgacccacaacctggagaggcactaaacctacccagagtccattttgctcactgaaatccctggcagcccatagatctgttgtaagaggcagccccatccagcaacagcccaatgaaagaccacctccacaatgagaaaggatgtgcagatgcaatgaaacacagtgtagattaccagaaaaaagccaaacatcgctgcctgcttctcttcctacaggaatcatgcagcactccaataaaatttggagagcaagagtttccttgttggcagctgtaaaaggagtttatggttttaaaattatcacagctgcccagtcattaaaacgtgacagtgtttagaaggaaacactggaaaacctttaccgttgagccatctgggaagatgttgagccagatccaggaaaccccaggctgacaaggaatatggaagacatgaaaagaagaggcaagtgtggaggtcacatcccacgttgtatctataggtctcactttcatttggagcagagtatgaaagccctcaaattgggagtttgccaggatggcccggtttgcatttcaaatgttctctgcacattggagtactcccacctgaacatcaggccatagtgtggactacttgcgtaattaaggaaatttgagaatgcagttggaatcactttctctgtcatctgtcttcacattttttgcaattggaagtgtgggaccccacccacttctcaccagattgcatccttaccccttctgaccttattgctgttcatgttctctttccctaaatgaaatcccaagatgatctaggagtgccttctcaggatctgaagaaactgctcagttatgaactgaattcaaggtaaattcaagggccctgaggacatgaatgctagtgtttcttcctgggatgaccactggacaatggaatactgaaggatgtctgttattgcgtgtgttgtgctccttttctttctagaagagcagctttttttggcaggcagaggtgatgtggaccttggtgtctcacagccagcctcccagtacactttggattcatgatccagagaaaattaaaaaacacagagccctgcagcttaagcagagccacacaggcatgtgacccaaaggttgggagacttaaaaaaaaaaatagtgctgcagcgcattagccacattcctttaagcagacttcacttacaggtgcgcacacacacacacacacacacacacacacacacacacataaacacacagtgctaaaaaaagccacacccatacacagacatcaaagactcacaataattttacagaaacacaccacccagcagtttctgaggctgtatggttctgcaggaagacttacgtgggagacagcaactctggggaacacaagcggggtgcacctagaaatcatagcagtgtcagtttcataaagattcacctctacatgtgtaggcaggcctgaggcatcctgcagatccttttggaaccttacagattttgcggtttattcctggggcttggcttgacatatcttctggctagctcacgtctgttctctcctaggatcatgagactatcctgtgtatcccacaaagaagacaggcaagattccttggctgatgcacctccacagaggtctccttctcagccaagcctcagggaattgtggcattcatggtgaggctagccagagctcacagctcaggcctggtgccctgagactagcacatgtgcattcaccagtgggcttggcactcggcagtcagagctgtcagccagcctaagccgaggaaaatggtacaggcaagagtgggcctgg

SEQ ID NO: 45013 - DNA, 2300 bp, Homo sapien
ggagtactttaacctgcaaggaatatttggagggcaaattggggccatttttgcaaactctccatttaagagccttcatacatgagccaaatgggagcagaattgattgattctgtattggatgtggcctccgtacttgcctcttttcccctgacttctacgtttctcgtcaacctagggtttcctgtttctggctcaatgacttccacactacatgtttcctagttcacagagaacgaccctcctgggaatccattgcatgagtgtttccttctaaacattgtcaccttttaaagactgggaagctttgatagttttaaaacggtaaattcttgttacacccaccaacaaggaatctgttttttttcccacttctatcacagggttgcatgtttcctctaggatgagaaggaggcagccatgtctggctttagcctgataatctagcccctgtttcatctcatctgcatggacttctcattgtggaggggccctttcactgggctgttgctggctaggactgccacttgccacagattattttgctgccagggatttcagagagtaaaagggactttgataaactggctgcactccatattgtggatcattgtctcatcgtagaggctgcagttgtttgcactttgcaggaggcttttggtttctgacaggaatcttgaacattgcctggactccagcaaaggcagctcattcttaggtgaaccttggtttttctttgttttcttggggaatccatagtgccccccaacagcagcactgcacaccattttcaagcttgccatcaccacagatggcctctgagacactgtctcaactacatctgcacaagtgagaggccattccgagatgtgagaacactgctccacattagacttgcctttgttatggttcttgcctttcatagatagcccctgcaaggctcagaatgaagggaggcattcagttcaaaagcccaatcatcttttgctgacatccacttctggtgtctcaggtatgtttctgtcgcccaaagaacactcaacgacacaccagattatattccaacccccttgggacccaattattgcacacaccctctttcgctaatggagttagaagagcagtttccagcgaccacatcgcagtcgcgaaacacctcttcctccagcgggacctgaacaaggaaatggccagcagggtccctgaggtcgagattttcagggtcctgcagtgggtttttatagtcagcctttttcccgataccaggcgggctctgcctgttccattatcccctgctgaggcagactgacagctctgacaacctgacttgagtctgcctcacaaatgcgcatgcgctagtctcagggtacctgatccgattgtgagctctgtctagcatcgctataaatgtcaccgttgcctagcaagaagtatctgcatcttggaaaaggggacctccgtggaggagcgtcagctgtgtcttctcgtctgtcttctctgtgaaatccacggatagtctcatgatcctaggagagggtagacgttagccagcgtgaagaaacaagcatagctacaggaataaaccacaaaatccttaagcatccagaaacatctgcaagatttggtaggcctgcctagacattgtacgggtgaatctttttgaaacttgccctactgtggtttctaggtacagcctgcctatgttccttggggttgctctctcctaggtgggaattcctgcagagccatgcatcctcatgcactgctgagctatgtttttctgtgggagtgttgcaactgttggatgtgtgtgtgtgtgtgtgtttttcattgtgtgtttaagaatgtgtttgttgctgtaagtggagtctgcttaaataatgtgtctaatgcacttcagtgcctctttttttttttttttttgaatgtttcaatctttgttggcctctctgttgctttgtttgtgctgtggggctccgtgttctttatttttctgtggatcatgaatctgcagtgaatcgggaggtgggccaagacatgcaggtgtcaaaatcaactcctcctgaaagaaataaaacaaaaaagagccactcttctagaaagaagaggagcacaccacaccagaaacagacatcttgcagtgtttcactgtctcaaccttatctgcacagtccgaggtcagtctgaggtaagagaataaccacaactgcatagtgaaagaccagtctgaggtatgagaacactcctccacctcggacttgccattgtcgtggtttctacctttcccagagagcttctga

SEQ ID NO: 45014 - DNA, 2300 bp, Homo sapien; identical to SEQ ID NO: 45003

SEQ ID NO: 45015 - DNA, 2300 bp, Homo sapien
attgagataatcatgtggtttttgcctttgtttcttttctgtttatatgccggattacgtgtattgattttcatatgttgaaacagccttgcatcccagggatgaagcccacttgatcattgtggataagctttttgatgtgctgttggatatggtttgccagtattttattgaggatttttgcatagatattcatcagggatattgttctaaaattctcttttttggttgtgtctctgccaggctttggtgttagggtgatgttggcctcataaaatgagttagggaggatttcctctttttctattgattggactagtttcagaaggaatggtaccagctcctccttgcacctctggtagaattcggctgtgaatccatctggtcctggacttttttttgttggtaagctgttaattattgcctcaaattcagagcctattattggtctattcagagattcaacttcttcccggtttagtcttgggagggtgtatgtgtcaaggaatttatcaatttcttctagattttctagtttatttgcctagaggtgtttgtagtattctctgaaggtagtttgtatttctgtgggatcagttgtgatatcccctttatcattttttattgcatctatttgattcttctctcttttcttctttattagtcttgctagtggtctatcagttttgttgatcttttcagaaaaccagctcctggaatcattggttttttgaaaggctttttatgtctctatctccttcaattctgctctgaccttagttatttcttgccttctgctagcttttgaatgtgtttgctcttgcttctctagttcttttaattgtgatgttagggtgtcaattttagatctttcctgctttctcttgtgggcatatagtgctataaatatccatctacacactgctttaaatgtgtcccagagattctggtatgttgtgtgtttgttctcattagtctcaaggtacaactttatttctgacttcatttcgttaggtacccagtagtcattcaggagcaggttgttcagtttccatgtaattgagaggttttgagtgagtttcttaatcctgagttctagtttgattgcactgtggtctgagagacattttgttataatttctgtttttttacatttgctgaggtgtgctttacttccaactatatggttgattttggaatggttggggtgtggttctgagaagaacgtatattctgttgatttggggtggagagttctgtagacatctattaggtccgcctggtgcagagctgaattcaattcctacaataataacaggagactttaacaccccactgtcaacattaggcagatcaatgagacagaaagttaacaaggataccttcaatttctttaatgattttatggaattgctattttacattctcctgtctttatctctacatgttcaattagaaaatcctcagtgaatacttttcagtatgatagagaaaatattgtgcaattaattactgatagatacacagtgaagtaatttctggttttcatttggtgctctcacactgaggatagaaaagtcttggttgtaatcttacatgatgaggagttctactatgctgttttcttttgctctgtgatctactgtcacagttgtttgaacttgccactgaaaaaagtgggaaattgtttccctcatgtctactcatctccctttcataggttttctggtggtgcattgtctagatggcttagtagctcatgatcacagaggtcatatttgacaagagaaagctttgttgctccaggactaagtgaaggtgtttaccacctagtgcctaaggtttctccagagccacgatggagcttaaaaaccattactgaaaccagaaagtgatggcagacattgagggctgcccagagtagaaagcaaaatgctcccttttgctttacaagtggtcactgcttatttggtcattaatgttgcttctgaccatgacgtgtttcttgttcatctttcttggtattccactgaaggtgcatctaaggaaacgagccctgtgtgatagtggtaaagagaacaactgcatccttctgtagctgatgccttgttgagctttgaagcacattgagaagaatctgaaatccttcctcattatggggtaagttgtgtcaaatttgactcccatgtaaatggcagcaggttcacgatgtcaaagaagaaactcagaatcagtaaataggatatggagttttactggcgacttacatagaggggagaaagtccagtgtcagtgggctt

SEQ ID NO: 45016 - DNA, 2300 bp, Homo sapien
ggtgtggctctgctgcctggtttctgcccacatgttagattgtgacatataactagggaagcacctagttgatatgacttttctttgtgggcccttcataatgaggacactgggatgtatctctgagcccaagactgaagtgaagtgactttcagcttctgcctggtctttacaagaagggattgtgacatatcgtagaggtcagaagtcaggttatttgtcactccttattttctggaaccattcccaccacccgaatttttggcctattgcaaggtccagcacccaggcgatgtttctcttttgcctgggtcctgcatacagatagaagtatggcatattgctggggccaaaactctgataatttcctgttgagagcaggacattatctcatgactcatgactgtcctggagccacagaaggtattttgacacatcctgggcccatcatgtgggtgttctgatatcttttgcctgggtttcttccacaggtaggatggttttgttttgctcagtccagcaccaatttaatatgactctaattcctataccctgccaagcaagggaggacatagtgacaagttgcttggcacagcaccaaagagatgttaccctcctgcatacattttgcccacaaatgggactctgacatataccttgatctcaacatatgccttagttgagatcacaggcctggtgatcagacttatattggagtcagccaataggagatattttgcctctcatcactaggctttgggcaatgggtaaggccctgggttgcatatttgtatgaagctcacagagctttacagcactaactcatagtgtataacctccttgggtggtacagagagtttcaagacaagaaccagcaaaatgttcagattgggattcttggttatgcacccaagtgaaagtaaatgtttccatcccacatggccaaagcccactgttaaggtcctgagtctaaaaagtaaatacagtagaaagttggaattttgaccttcctatgtggatctgaccacagatgggatagcgactcatttttacatctagctcacaggcatgacaatggatctcattccttaacccagcctgcagaagagatgttgactataaaacttgggtttagggcaatatgttaagatcgtgaatctatactaccatgtaggggtcagagtggtttgccactctcacacgtgctgtataaacccttaaaatgttgtagagtgtcatacaacagcccaggaaacatggaaaattgtgactctcatatacaaacccagctcacattcaatggtgtcaacatcaaagacaaaaagatttggcatattactaggcctagtaaccaggtgttgtgagtttttggattacattttttttctgttgggtgcattgtgacatatcactgggttagaattataataatgtgactgttctgcctgagccctgccaacagggcaaattatctcatatctctgggcctataagctaggtgatttttctcccctccctgtgcactgccatcagaacacattgtgaaatattgtttggcttaacatctaggttatgtgatttcctcccctgcctgtgtcctgctcaccaaaaaagttttgatgtactgcttattgcagaaactatgtgatgtgactcttcttcatatgctaggccctgccaagaaagtggattattacacactgcagagcacagcacctatgtggagtaactcctctttttcttattccctttctatagtgggcttggggacatattatttgaggctatatccaggtgatgtgactcttctaaataggcccaccctattaatgagattataatgtatcagcagctcagcacccaggtgatgtctctcctgcctttttgtggggaaaagcaagagagatcagattgttactgtgtctgtgtagaaagaagtagacataggagactccattttgttatgtactaagaaaaattcttctgccttgagattctgttaatctatgaccttacccccaaccccatgctctctgaaacatgtgctgtgtcaactcagagttgaatggattaagggcggtgcaggatgtgctttgttaaacagatgcttgaaggcagcatgctccttaagagtcatcaccactccctaatctcaagtacccagggacacaaaaactgcggaaggccgcagggacctctgcctaggaaagccaggtattgtccaaggtttctccccatgtgatagtctgaaatatggcctcgtgggaagggaaagacctgaccgtcccccagcccgacac

SEQ ID NO: 45017 - DNA, 2300 bp, Homo sapien
ttatatgtcaagtttaaattcaaaaaatatttttcagtcagtcgtggtggctcacacctgtaaccctagtacttcaggatcctgaggtggatggatcacttgaggtcaggggtttcaaaccagcctggtgaaactatgtctccactaaaaatccaaaaaaaaaaaaatttttctggggatggtggtacatgcctgtaatgctacttgggaggctgaagccagacaagttcttgaatctgagatgtggaggctgcagtgatcccagattgtgtcaccacactgcaggtggagtgacaccgcaagattctgtctcaaaaacagacaaacagaaaaatattttttctttcttacaacaaaaagacacacatgtgttctagatatgccctggtggagtggagtgggtgtggagcctgtctttgtaaagaaggaagaagggccagtacccaggattatgtgtgaaggatgaattggcacacaaataaaggggcagccaggcccttggcctagcaacactgaagcttacaggtggcttcggaaagcaggataaatagcccgtggacttaatgctagatggctctgtaacaatgaaacatctgcccagggatcttagcaatcctgctagaaggccctgactataccctggattggagatacctgaggtagagtggctgccagagagcctgagcaaacaccagttttgaccactatggctgggtcaatctaaaatagcttatctcttctgatttacaatacaaaatatagaaaaataaagtgaaaaaagtaaaatcaagagaaaaaaattaaaaaataagtttaaagtaattaaaaatagtaaagacaaataaactgaaacaaaatagagaaaaataaagagaaatgtaattaagatcagggaaagtaaataaaatgaagatgaagaaaataaatacaataaaattaagagaaataaacagaaatgaaacaatttgcaatagaataaaataaaactttatgaatcaggagaaaaaataaaagtaaaaataaagataaatatggagaaataaaataaaataatataaagggataagaatgggagtaaataagataaaaaagaaattaaataaaatgtttcaaacaagacacaaattggagaacatttgaaatgaagagacaataatataaaaaataaaagatagaaacaaatttaaatgcatagaaaaaatgaaagtaaataaaaaataaaaaagaaaaagaaaaatatatagaaaaataaaagttaaagagcaaaataagacctggggataatctacaaaatgtttcacccaacaattgcatagtacatatttctatatacatttggcatgttttcttagataggcaaacttttaagctagaatgcaagttttagcatatttaaactgacggtaatcacaaaaaatattatttctgactacaataaaatataactggaagtaaaaaccaaaagaaaactagtatatctgcatatacatgaaacctagacaaattcttgagcatactatttttcaagagttagaataggcaagtttctttagatgttaattgtttggattcactcaggccgctggcagaaatattacagggaagtattaggaaaagttataaggaatagtaacaaacctttttggcaggctaaaaggctaaaattattatatagcttgtaataattgaacaggctgaaggcaacctcttcttaccttaaagcattaggtcatagggtaaatactagggacaactgaggcttctccagttaagtctgtttactctacctccactaactaagatggctctctccagggagttcgaccagagaaattgcccccaatggtatttactttagactgtggtaactgaggtttaatcattcacagaactattctcttaacaatgttaattatccacaagtgtgtttactcaaagcttctgtgattaattctatactaaataaatgcctggagggtgagttgctcagggtgggcctccattctttacaggactctccgtggagtctgggagtggcctcggaccctctgctgctggcaaagcaggatatctgtgtgtcaggtagtttattcacccatcgccaggtctgcagttggagcccattgtgtgaggcagtctgtgaaggaagtgtgagaaccaccctcatgaggaaagctgtagaggaagagtgaggaatgcgacagactccctgaaagcaaaggtggaaaaagaattcacgtggtgaagtcagtgactaatcagtaagtcattggtgcccactcgaggttaccaagttctgg

SEQ ID NO: 45018 - DNA, 2300 bp, Homo sapien
gaatttagatatatcactgaaatcagcatccaggcgatgtgaatcttcttccagagtcctccccacaagaaggattgtgacatttcactggaccagcaccgactctgatgatgtgactttcctttcttctccctgcccacaggtgatattgtgccatatacttgagagaagataaaaaaattataacaacaactcctgtacctagagccagaacatttgcaggatggtgactctcatccctgaacctttccacaggtgttgttgtgacatacacctttgccaagctcctgagtgatttaataatcctgcctatttatagcccagagataacagtttgatatatacattggccaaaaaccttggtgatttgacttccctgtcttagcagtgtcctcagaagggatcgtaacaaatctctggacccatcatctagggtatttgacttttctctcctgcatgaaccctgcttccagtgaagagtgtagcatttctaagcactgcatttaaatgacatgaccctcttgcctgggccctttcaataggaggcattgttacatttctctgggcccatcatttaggttatatgactctcctctcctgtgtggacactctccagcaaggacattatgccaacgacctgggcctatgaccaaattttgtggcttttctgttatggcccttcctgcaaataaaatattggaacatttttggctcatggtttaggtgatgtggtttttctgcccatttaataaccacagagagcatggtagcatatacctaggcgcaactaacggccatgatagtgactgtcatatgtgaacccagccaataggagaaattttgacttttataactaggtttaggaacataagtgatgtcaatgatctcttcccggtaaaaatgtcacagaagactataacactcacacatgttttgttacacccttgtgttgtataaagaatgccataacagggcctagcacaccgagaaaattgtcagtctcatatgcaaacccagctgacagcaagaactttcaccatcatagacggatgaaggcaactcttctacatgaaaatagggcatgtgtggtattgtaaatctaatttctagaattttattccatcatgactctgatacaaatctttgtcatgcaccattgtgatttcattcttaagactggttgaagcctacatataaaattttgagatctcccagggccaaccttgaagtggtttgactcttctccctgggccctgctctcagtaagaattttgacatcactggatgcagtaaccaggtaatgttatattcttgactgcaccatgacacagacatcattgtgacatattactgtgtccgtcacttaaaagatgtaactctcctctctggaatgggcactgcacataggataggatagtcacatattcataggccaggcacacaggtgatgatactttttttttttgccagggccatgcccaaaagaaggcattttgacatatcaaagggcctatcatgcaggtaatatgactcttctgcttgggatctgcccacctgcatagtgacacattgctaggccagacacaaaggtgatggtactgttcagccagggacaggctttaagaaaagttttatggctgggcatggtggctcacacctgtaatcccagcactttgggaggccgaggcgggtggatcacgaggtgaggagatcgagaccatcctggctaacacggtgaaaccccatttctactaaaaatacaaaaaaataaggcaggtgccatggcaggtgcctgaagtcccagctacttgggaggctgaggtgggagaatggcgtgaacccaggagtcggagcttgcagtgagccgagatcgtgccactgcactccagtctgggcaacagagcgaggctccatctcaaaaaaaaaagaaaaaaggaagaaagaaaagaaaagctttgtgacatatctctatgcctatcacctaggtgatgtgacttcctgcttgaccctgcccacatggagcattgtgacatatgtgtggaacctgcacttaggtgatgtaactctcttgactgggtccttttctaaggggggcttgtgaatatctcaggacccaggaccatgtgatatggtattcagccttgttttttcccacatattaaagtgtgacatatacctaaagaagcacctaggtgatatgattctctttttctgcctgatccctgcctactggtgacattcggccatatctctgagcacataacctatatgatgtgactctcttattctgtctgcgcttt

SEQ ID NO: 45019 - DNA, 2300 bp, Homo sapien
cagatctgagatatgcaaagaaatggtaagcaaaatgttactacatatgtggatgggtctaaaaaaacgatgtctaatttatatggtgaaaccaggatagagctaaaatagtgaataacatataaactgagagaggggagggtgtccaaagctaaaacatcctaaaggcctttgtattattcaagaggagagtaaagctatgtattagctttatattttaagtttacattttcaaatagtaaaacagtcacttaaaaatatagactgcattactccaaataagttgaggaataaaataacgtgacaaaaagaaaaaacacaaaacaaaacacatacacacgtgagcatattactgttatcttctagtttctattgctactgagaagcttcttctgtaagttttaactttcttgtttgtatgccattcttattcaagataagtagtgttgtataaatttttactgtgagcgtgtccttaaaggatcattttctttcagcctaggttgtagaaggattcatccaagtcggctttatgtttgcttctgccaggcattctagatgccccatgtctaggatctctttaggcaggagagagggtgatggtgtaggaggacccatttcttggcttgcagattccaataatatgtcacagatttaaaccccaaactttgatgaaatgcaggtctagggttttaaaatataatgagagttaaatacgtattttcttcatccagagatggggcaagcttcctcatctgctcgttcatgggtgatttatattttccccactccatccttttcctaaggattttagggacaatggctttttgcagagtactcagttccagctcccaccttgagcccttacctcctgcccctaaacatccagacctcaagttagagagagtaacattttgcccacacctaggaggaccaatccttctggtttccttagggatgcaggaatttctcagtgctaaaaccagtaagtcctgggcaaacgagtatgactggctgccctacaacccagcccccatatccagggcaggagaacaatcatttgaacaattcattgctctggttttcagttgatttttggttcttggaatttcccttctttttttatgggcttatctgcctattggaaacaaaacgttatttttttttatcccgcattactagatgtcagtagtgagacacgtctcacgttatagcagtccagcattttgccagttcaaaaagtcacattttaattctttccgtcagtacagaagtgaagtttgaggataaaggtcatagccacgtagccctgtgtgcataaccaggtgctggagtggtccccaaagttatgtgattggctccaccacctgccccacagcttgctcccgctctaggcccttgctctgatcttgagaatgttctgtaagtctctaggcaggcctagcgtctttctgtaagtcctagaaggtgaagtcttccattaaaatgtaaaatccctgagcaaagagatattattttattctgttcactcctgcatctgcagtacctggtaatcacaggcactcagtaactatctcttgaaagaaggaacatcctgaatgtcaaaactggcgttccctcccatccaaccccttatatctcaaacttgacagaaaggagtccaagtttctggcctgttgatgtctccctccgttttccacagacttgctactatttatttctgcaggtactttaaaagattttggggtgggtgtgacgctaacagtgattgtgctaaacctgtgcattccggaagccattttgaaactacagcccagacacattatcattttttaaaactataccatatatttcagtatgcatacttatttcaagggtgttttggaggcggtgcctgcctggaacccaggcactggccagcacacacgcacggcataccctgcgtactctacgcacccacagcgtgggggacggccgtcatcccccgcaggcctccaccctccagggggcgggtgtgctgccacccattggctcaggccgataccacgcgccccgatacccggcacaggagccacctcccagagccccgcagtccatgcctcagtcggcctgcgctcctcagcctggcggttctacctccgagggttcgcccgcccttggttttccttacaccttagcctttggctcctttgaccactcgaagccccacagcgtgttccagcggacttcaccagcagacccagaagtggtgggtgaaacactgcctctgttcctccttgagcctgtcgggagctgctgcc

SEQ ID NO: 45020 - DNA, 2300 bp, Homo sapien
cacacaaggaaattataaagaatttgctacaggcgtaaggaaaatgattcagaaggcagatctgagatatgcaaagaaatggtaagcaaaatgttactacatatgtggatgggtctaaaaaaacgatgtctaatttatatggtgaaaccaggatagagctaaaatagtgaataacatataaactgagagaggggagggtgtccaaagctaaaacatcctaaaggcctttgtattattcaagaggagagtaaagctatgtattagctttatattttaagtttacattttcaaatagtaaaacagtcacttaaaaatatagactgcattactccaaataagttgaggaaaaaaataacgtgacaaaaagaaaaaacacaaaacaaaacacatacacacgtgagcatattactgttatcttctagtttctattgctactgagaagcttcttctgtaagttttaactttcttgtttgtatgccattcttattcaagataagtagtgttgtataaatttttactgtgagcgtgtccttaaaggatcattttctttcagcctaggttgtagaaggattcatccaagtcggctttatgtttgcttctgccaggcattctagatgccccatgtctaggatctctttaggcaggagagagggtgatggtgtaggaggacccatttcttggcttgcagattccaataatatgtcacagatttaaaccccaaactttgatgaaatgcaggtctagggttttaaaatataatgagagttaaatacgtattttcttcatccagagatggggcaagcttcctcatctgctcgttcatgggtgatttatattttccccactccatccttttcctaaggattttagggacaatggctttttgcagagtactcagttccagctcccaccttgagcccttacctcctgcccctaaacatccagacctcaagttagagagagtaacattttgcccacacctaggaggaccaatccttctggtttccttagggatgcaggaatttctcagtgctaaaaccagtaagtcctgggcaaacgagtatgactggctgccctacaacccagcccccatatccagggcaggagaacaatcatttgaacaattcattgctctggttttcagttgatttttggttcttggaatttcccttctttttttatgggcttatctgcctattggaaacaaaacgttatttttttttatcccgcattactagatgtcagtagtgagacacgtctcacgttatagcagtccagcattttgccagttcaaaaagtcacattttaattctttccgtcagtacagaagtgaagtttgaggataaaggtcatagccacgtagccctgtgtgcataaccaggtgctggagtggtccccaaagttatgtgattggctccaccacctgccccacagcttgctcccgctctaggcccttgctctgatcttgagaatgttctgtaagtctctaggcaggcctagcgtctttctgtaagtcctagaaggtgaagtcttccattaaaatgtaaaatccctgagcaaagagatattattttattctgttcactcctgcatctgcagtacctggtaatcacaggcactcagtaactatctcttgaaagaaggaacatcctgaatgtcaaaactggcgttccctcccatccaaccccttatatctcaaacttgacagaaaggagtccaagtttctggcctgttgatgtctccctccgttttccacagacttgctactatttatttctgcaggtactttaaaagattttggggtgggtgtgacgctaacagtgattgtgctaaacctgtgcattccggaagccattttgaaactacagcccagacacattatcattttttaaaactataccatatatttcagtatgcatacttatttcaagggtgttttggaggcggtgcctgcctggaacccaggcactggccagcacacacgcacggcataccctgcgtactctacgcacccacagcgtgggggacggccgtcatcccccgcaggcctccaccctccagggggcgggtgtgctgccacccattggctcaggccgataccacgcgccccgatacccggcacaggagccacctcccagagccccgcagtccatgcctcagtcggcctgcgctcctcagcctggcggttctacctccgagggttcgcccgcccttggttttccttacaccttagcctttggctcctttgaccactcgaagccccacagcgtgttccagcggacttcaccagcagacccaga

SEQ ID NO: 45021 - DNA, 2300 bp, Homo sapien; identical to SEQ ID NO: 45003

SEQ ID NO: 45022 - DNA, 2300 bp, Homo sapien
acttttttttttttttttttttttttttgagacggagtctcgctctgtcgcccaggctggagtgcagtggcgggatctcggctcactgcaagctccgcctcccgggttcacgccattctcctgcctcagcctcccaagtagctgggactacaggcgcccgccactacgcccggctaattttttgtatttttagtagagacggggtttcaccgttttagccgggatggtctcgatctcctgacctcgtgatccgcccgcctcggcctcccaaagtgctgggattacaggcgtgagccaccgcgcccggcccagaagaagaatactttaagtgtggtcatgttttattttacccttgtgacattttctttgtcaataggtactaccttgtcctagttcataaaaatttgtgatatttcaagaagagcataaagtaatttatttattctttctcaaaatgcagagacagtaaaaattaaccattttacgggctttaatacaaagtttactaaaaaacaaatactgatcaaaatataaataaataccatttatgaacacttctaagttaaaacgaatatttttgttaaaattttctgggaagattagccacaacaagagtaatgcagtcttctcttttcttttcttaccttttttctttctctttctttctctttttctttctttctttctctctttttctttctttctttctttgttttctttcttcctttctttcttcctttgttttttctctttcttttcttcctctcttctttcctttctttctttccttttttttttttttttttttgatggtgtttcactcttgttgcctcggctggagtgcaatggttgtgattttggctcactgcaacttccaccccaggagttcaatcgattctcctgcctcagcctcccaagtagctgggattacagtcatgtgccaccacacctggttaattctgtatttttggtagagacaaggtttcaccttgttagccagggtggtctggatctcctgacctcacgatccaccctcctcagcctctcaaagtgctgggattattttgagtcatggcacccagccaggttaatcatttaaaagattttagtgtgctataacatttagcatgacttctcaccaagttcatgtagccaaaaattggaattacctaaattacagcagttgtccagagtaacagctctattgctcagaaaccttatttttttatgccagaaacaatcaaagacagggtaaaaatgtaaaaaacaagcagattttaattctacacattcttcacctttaatgtttgatagcttaatttcttgctgagataaagatattgccatatttttaataggaattcttaaatattacaaccaatatacatacttttcatatgtcacaatgtttggagcatgggaagttgtatttttttgtgctgggggcacttttgtggtagaatttactaagggatgcttctaaaatttgcttcacctaattccagtaaagtgcatattatcagaatccacagtactttgaagcaccattgtgccaagatttctgactgttttgctagccagtcacaattttccttgaaagcagtaagtctcctagtttatttctatattattttaaagcttttgtcattagatgtagggtttactgaagataaaagtgccttctgattttaaataattaatataattttttatttgatgtaatatctctatgcccctgttggaaacagtaggatatgaagtgtgttgcatagtgtgaggatcagcaattcatttgtttgaaccggttacaatatactatgtttttatctttttatagtatataagcattagcattgaacaccatgaatgcaaaatgcagtctacattagtcaagacctataaatacactatcagggctactgatattggtatattgtaatccaactatgtcatgtgtcttcctatatggactattgttatttgcagtctatgtttctcttctggcctagacttagattttggaatttctgttccttagaaagtacaagagaagcatatttagattaatcccatttctgcattactgctgcacctctttaaggttgccacttcaagggactacatcatgatgtcctgtttctaatgacctcccaatcatcctgcagaagattcttcaaatggggatcaacatgtccttatttaaggtaccccttaaatttctactattaagtggatgccaggatatgattcagcccattgaaagtccgtgtatcacatactggcatctgtttgaaagtcca

SEQ ID NO: 45023 - DNA, 2300 bp, Homo sapien
tactttctgaagtatttaaggaaggacagaaacagaacaagccttgagatggtgaacaccatcaagaactttgtgaatactttcaatcaattttaaaagcctgtttttgtatcagtcagtggcccatccttcggaataggtgcatccacactgcctctttgtgatttcttctgagctaatgaaaagccttggtttcaaaccccttatatgacatctggacagagtccagatggctgttgtgttactttagttcctacttgaactttgcatcatccagcctccttaattattgtggccatgagacattacttcatcccttgattgatcccaggccaaggtctcaggccaagctgtcacttcagctccttcttggtccagggccaagttccaaggctgagccttgtagcttctacaaatcatcacttcagctccagatgaatccaaggccaagtttcagggccaagccaaatgacacctactccaagaacactaaccacatttctttacttctctgtccttagaaactgtaaagcacagcctcatagtaggtaaaccactcacattccacccccactgtgaagagttttttactttcacttataaaagttttgattcaacctttttgcatccatcctccttaattttcttggccatgagacaaagaactctgtgtgatatctcacaattagagttttctaggtcgtagtgcactaatgagactgcaatgattgaagtctgggaattgagctctgggatgcatcagccttgcgagaccaactgacacactgtccccacactgtgatacacacccttcgggtcagtcaaccatatagtggtcaccaatggagtctgaaaaggggcaaggcagatttatacagcctagaaacctgagggacaccatcaagcagccatacatatgcattttggaagttccaaggaagagacaaaaactcatggatactatttaacaacatagtcataaagaatgcaacaatttaagacaataagtaagcacccaaggagctcaacagactccaagtaacaaaaactcaaagaaacaaactcaaacttacctgataattaaactgtctaaaataaatacaaagagaaccttgaggattttcaagggaagcaggggaagtagctagtcatgtaaaagggaccctaaaaataaccagtggatcacttatctgaataaccaccgaaaagcagtagatttcttatctgaaaactgagatagaaagcagtagcctcatatattccaagtgatgtcagaaaaaactgtcaagcctaaacattatgatccaccaaactgtccatcaaaggtgagggacaaattatgacattcccatataaaaactggcaccttttacaagtagactaccctttaagaaatgtcttatggagtacttcagggtagaatggacagatactcaaaagcagtatgaacaaacaaagattaaggtaaagataaatacatgaacaaatatgtaagataaaaaatttggctgggctcagtggctcacacctgtaatcccagcattttgggaggctgaggtgcttggatcacgaggtcaggagatcgagacaatcctggctaacatggtgaaaccccgtctctactaaaaatacaacaaattcgtagggccaggtggcaggtgcctgtagtctcagctactcgggaggctgagacaggagaatggcatgaatccgggaggtggagcttgtagtgagccaagatctcactactgcactccagcctcattgacagggcgagactccatctcaaaacaaaacaaaacaaaacaaaacaaaacgaacaattaacaatgtgcacctccacaatttgttctccacataacttaaaacacaaatatatttaataaaaaaactaccactaatttgtgtttttgacataaaatcaataaaggtataattttgagaactcagtaagtgaaataatggaggtacattatacaggagtaaaggctttgtatgttactgaaggtaagctagtgtaactttaaaaatgttataacattagaatgttccatataatcgtcatagcaaccacaattaaacaaagaaacacaaaagagtaacaggcaggaagaaagctttctgtactacaccagagggttggggctgtggatttagctactctcacctgaggctactgagcaagttgtcatgcaccatgagacaaagcccaagctgtcccaccaggcagtaagtatggagaggttcaggcacatggcatagctgctatttcgcacaattttcactacaccagtggtgac

SEQ ID NO: 45024 - DNA, 2300 bp, Homo sapien
ggcctctcatcccctccaggaacaccactgaggcctgacaccaggggccgccaatgcctccctgctgggctggctgtatggaagacctcagtgtcaatggccagaggtgggggcttcgggaagccttgctgacacacaacatggcggcaggctgcagactggaggaggtggaggagtatgaggacaatacctatggccattatgaagctttctccaccctggcccccagggcttggctgtccatggatctagctgagccatgcatgcttgagccagggctgcctcctgtctttaccaatttcacccagctgctgactatcagcccagtggtggtgaccgagggtggcacagccgagtggtggcatgtgcagcccatgctggccctgatggaggctgaactgcataaatcccaggtgctgttcagcgtgacctgaggggcacactacagtgaactcgagctggacatcctgggtgcccaggcatgagaaatgttcaccctcctggacatggtgaactgcaaggtctgcttcatccatgatggccctggtgctggaggtgttggtgatggcttgggtgcccatgccttcatgcctgcggaggggccaaactgacctcctgcccatccaggtcaaccctgtcaatgacccaccccgtatcatcttcccatgtggcagccttatggtgatcctggaacacacacagaagcctctggggcctgaggttttccaggcctatgacctggactctgcctgtgagggcctcaccttccagctccttggcacctcctctggcctccctgtggagcactgagaccaggctggggagccggtgacccagttctcctgctgggagttggaggccgacagcctagtctatgtccactgcagtggccctgcataggacttgacgttccgggtcagcaatggactgcaggccagccccccgtccatgctgaaggtggtggccatccagccggccatacagatccactgcagcacagggctgcatctggcccaggactctgccatgcccatcttgcctaccaacctgtcggtggagaccagcaccgtggggcaggatgtgactgtgttgttctgtgtcaccagaggcctgcagttcagggaggtgcagaagcagggggctggtggggtggagggtgctgagtggtgggccacacagtcattccaccagcaggatgtggagcagggccacatgaggtacctgagcactaacccacagcactatgccgaggacaccgtgaagaacctggatctgcaggtgcaggtgagctgggaaatcctgagcaatctgtccttcctagtgaccatccagagagccactgtgtggatgctgcagctgcggccactgcacactcaacacccagcagaggccctcaccacagcccacctggaggccaccctggaagaggcaggcccaagccccccaaccttccactctgaggtggttcaggctcccaggaaaggcaaccttcaactacagggcacgacactgtcagatggtcagggcttcacccaggatgatgtacaggctggagaggtgacctatagggccatggcacatgcctcagtggcagtggaggacaccttctgtttccatgtcacagctccactatatttctccccactctgtactttctccatccatactggcggtgacccagacatgcctgtcctcaccaatgtcctcttggtgcccgagggtggtgggtgtgtcctctctgctgaccagctcttcgtcaagagcctcaacagtgccaggtacctctatgaggccatgtagtggccccgccatgggaggttgacttggtgtggggcacaggacaagaccactatggtgacttccttcaccaatggagatctgttgcatggccagccggtctagcagcatgatgactccaagatcacggaagatgatatgccatttgctgctgccaccaggaccagagcagtggtgatgtggcctgggaggaggtacggggtgtcttctgagtggccatccagactgtgaatgaccacgcccctgtgcagagcatcagctgcgtcttccatgtggcctggggtaggtggcagctgctgactccacacaacatggccttcagcaatgctgattcaggctttgtggatgcccagctggtgctgacccacaaggacctcctgtctggcagtatcatggccacggatgagcccatgcagcccatcttctgcttcatccaggaggggcctcaggaagaggcgagtcctgttcacgcactcaggctgaccatggctggatcctgctgc

SEQ ID NO: 45025 - DNA, 2300 bp, Homo sapien
tttttatggctgcatagtattccgtggtgtatatgtgccacattttctcaatccagtctatcattgttggacgtttgggttggttcccagtctttgctattgtgaatagtgccacaataaacatacgtgtgcatgtgtctttatagcagcatgatttataatcctttgcatatatacccagtaatgggatggctgggtcaaatggtatttctagtcctagatccctgaggaattgccacactgacttccacaatggttgaactagtttacagtcccaccaacagtgtaaaagtgttcctatttctccacaacctctccagcacctgttgtttcctgactttttaatgattgccattctaactggtgtgagatggtatctcattgtggttttgatttgcatttctctgatggccagtgacggtaagcattttttcatgcgttttttggctgcataaatgtcttcttttgagaagtgtctattcatgtccttcacccattttttgatggggttgtttttttcttgtaaatttgtttgagttcattgtagattctggatattagccctttgtcagatgagtaggttgcaaaaattttctcccattttgtaggttgcctgttcactctgatggtagtttcttttgctgtgctgaagctctttcgtttaattagatcccatttgtcaattttggcttttgttgccattgcttttgcctcatttcagagagaagtctggtatacgcttggaaacctatgtgtctatcatccctaagaacattaatgtttattgagagtttaataaacattaatgttcttagggatgatagacacataggtttccaagcgtatagcagacttctctctaaaatgaggcttgggttgtcctctttctgataaattcccagatttaacagaaaagctgccttctgccatgaggacacattgatatgaaagtgtgagaggtactcgtgcacttctttacactaacagacatgtgaggatgtatgactctaaactacacggcctacagttcctgcctgcttaatgtttacttttctaccactgtccctggttttggtccctggaagctgctgattcatggcaaaaccccagagcttggagtcagaagactgagtttaagttccagtattgcctttttctttccttctttttttttttctatccatgatatcaatcactctcagtcactaaatgattgtgacaacatcttgtacagttgttggtggcattaaaccagatggtgtataagagtattttgtcaaaactgtaaagcaggatgtggctataggggctgattgttctcatgagtgttgctgctcttctttcccacagttaaaagaatattggcagaggaagagccctggcattccagcaggagctaacaggaaaaagaaaatcaatggcagtagccctgacacagccacttctggtggttaccactcacctggggatgtgagtcttggctggccagggtcctggggacagggggcctaaggggcagtagggggtaatttttaagattgtagatggactattgggtactggttaagaattctgggtttgaatcctgcctctccgtctgctaatgattgattagggattgattagcatatgatttagggcaagttgcttgaggtctttgggtctctgttttcacatctgcataatagaggtggtatttttgacttccatttgtgaagtttaaatcagatttgttattgcttatatgtgaatccttagtacatggcctgctgtaaacacccaggacacccaggaaatggttgttgtttgattttcctcatccccagtctcaaggggaagccagttaatgagaagagacacttgccatcaggctgtccctttaggagtcactgaaagggccccagggtgggatggtggggagataagaaccatgagagaagttggcacaaaggagttatgggacaaagggtccaagataggcagaaaagaagcttttgccagttgatggggaagaaaggaaatcagagggcttagacagtgaggggggacagaacatctccatgtgcactctcatctcttgcagtcagcaacaggtatctacggggaaggccatgcatcatctgctaccctggaggatctggaggtaagaggccctgggctgaggtgcagtgaccctgcaggccagccctccaacctcctcccacagcaggggcttgttgcccctctgccagctgagacaacccacaccctccaccagccctaatgattgttctctctacccctccccacaatcttcctcc

SEQ ID NO: 45026 - DNA, 2300 bp, Homo sapien
attgagataatcatgtggtttttgcctttgtttcttttctgtttatatgccggattacgtgtattgattttcatatgttgaaacagccttgcatcccagggatgaagcccacttgatcattgtggataagctttttgatgtgctgttggatatggtttgccagtattttattgaggatttttgcatagatattcatcagggatattgttctaaaattctcttttttggttgtgtctctgccaggctttggtgttagggtgatgttggcctcataaaatgagttagggaggatttcctctttttctattgattggactagtttcagaaggaatggtaccagctcctccttgcacctctggtagaattcggctgtgaatccatctggtcctggacttttttttgttggtaagctgttaattattgcctcaaattcagagcctattattggtctattcagagattcaacttcttcccggtttagtcttgggagggtgtatgtgtcaaggaatttatcaatttcttctagattttctagtttatttgcctagaggtgtttgtagtattctctgaaggtagtttgtatttctgtgggatcagttgtgatatcccctttatcattttttattgcatctatttgattcttctctcttttcttctttattagtcttgctagtggtctatcagttttgttgatcttttcagaaaaccagctcctggaatcattggttttttgaaaggctttttatgtctctatctccttcaattctgctctgaccttagttatttcttgccttctgctagtttttgaatgtgtttgctcttgcttctctagttcttttaattgtgatgttagggtgtcaattttagatctttcctgctttctcttgtgggcatatagtgctataaatatccatctacacactgctttaaatgtgtcccagagattctggtatgttgtgtgtttgttctcattagtctcaaggtacaactttatttctgacttcatttcgttaggtacccagtagtcattcaggagcaggttgttcagtttccatgtaattgagaggttttgagtgagtttcttaatcctgagttctagtttgattgcactgtggtctgagagacattttgttataatttctgtttttttacatttgctgaggtgtgctttacttccaactatatggttgattttggaatggttggggtgtggttctgagaagaacgtatattctgttgatttggggtggagagttctgtagacatctattaggtccgcctggtgcagagctgaattcaattcctacaataataacaggagactttaacaccccactgtcaacattaggcagatcaatgagacagaaagttaacaaggataccttcaatttctttaatgattttatggaattgctattttacattctcctgtctttatctctacatgttcaattagaaaatcctcagtgaatacttttcagtatgatagagaaaatattgtgcaattaattactgatagatacacagtgaagtaatttctggttttcatttggtgctctcacactgaggatagaaaagtcttggttgtaatcttacatgatgaggagttctactatgctgttttcttttgctctgtgatctactgtcacagttgtttgaacttgccactgaaaaaagtgggaaattgtttccctcatgtctactcatctccctttcataggttttctggtggtgcattgtctagatggcttagtagctcatgatcacagaggtcatatttgacaagagaaagctttgttgctccaggactaagtgaaggtgtttaccacctagtgcctaaggtttctccagagccacgatggagcttaaaaaccattactgaaaccagaaagtgatggcagacattgagggctgcccagagtagaaagcaaaatgctcccttttgctttacaagtggtcactgcttatttggtcattaatgttgcttctgaccatgacgtgtttcttgttcatctttcttggtattccactgaaggtgcatctaaggaaacgagccctgtgtgatagtggtaaagagaacaactgcatccttctgtagctgatgccttgttgagctttgaagcacattgagaagaatctgaaatccttcctcattatggggtaagttgtgtcaaatttgactcccatgtaaatggcagcaggttcacgatgtcaaagaagaaactcagaatcagtaaataggatatggagttttactggcgacttacatagaggagagaaagtccagtgtcagtgggctt

SEQ ID NO: 45027 - DNA, 2300 bp, Homo sapien; identical to SEQ ID NO: 45016

SEQ ID NO: 45028 - DNA, 2300 bp, Homo sapien
tatatgtcaagtttaaattcaaaaaatatttttcagtcagtcgtggtggctcacacctgtaaccctagtacttcaggatcctgaggtggatggatcacttgaggtcaggggtttcaaaccagcctggtgaaactatgtctccactaaaaatccaaaaaaaaaaaaaaattttctggggatggtggtacatgcctgtaatgctacttgggaggctgaagccagacaagttcttgaatctgagatgtggaggctgcagtgatcccagattgtgtcaccacactgcaggtggagtgacaccgcaagattctgtctcaaaaacagacaaacagaaaaatattttttctttcttacaacaaaaagacacacatgtgttctagatatgccctggtggagtggagtgggtgtggagcctgtctttgtaaagaaggaagaagggccagtacccaggattatgtgtgaaggatgaattggcacacaaataaaggggcagccaggcccttggcctagcaacactgaagcttacaggtggcttcggaaagcaggataaatagcccgtggacttaatgctagatggctctgtaacaatgaaacatctgcccagggatcttagcaatcctgctagaaggccctgactataccctggattggagatacctgaggtagagtggctgccagagagcctgagcaaacaccagttttgaccactatggctgggtcaatctaaaatagcttatctcttctgatttacaatacaaaatatagaaaaataaagtgaaaaaagtaaaatcaagagaaaaaaattaaaaaataagtttaaagtaattaaaaatagtaaagacaaataaactgaaacaaaatagagaaaaataaagagaaatgtaattaagatcagggaaagtaaataaaatgaagatgaagaaaataaatacaataaaattaagagaaataaacagaaatgaaacaatttgcaatagaataaaataaaactttatgaatcaggagaaaaaataaaagtaaaaataaagataaatatggagaaataaaataaaataatataaagggataagaatgggagtaaataagataaaaaagaaattaaataaaatgtttcaaacaagacacaaattggagaacatttgaaatgaagagacaataatataaaaaataaaagatagaaacaaatttaaatgcatagaaaaaatgaaagtaaatacaaaataaaaaagaaaaagaaaaatatatagaaaaataaaagttaaagagcaaaataagacctggggataatctacaaaatgtttcacccaacaattgcatagtacatatttctatatacatttggcatgttttcttagataggcaaacttttaagctagaatgcaagttttagcatatttaaactgacggtaatcacaaaaaatattatttctgactacaataaaatataactggaagtaaaaaccaaaagaaaactagtatatctgcatatacatgaaacctagacaaattcttgagcatactatttttcaagagttagaataggcaagtttctttagatgttaattgtttggattcactcaggccgctggcagaaatattacagggaagtattaggaaaagttataaggaatagtaacaaacctttttggcaggctaaaaggctaaaattattatatagcttgtaataattgaacaggctgaaggcaacctcttcttaccttaaagcattaggtcatagggtaaatactagggacaactgaggcttctccagttaagtctgtttactctacctccactaactaacatggctctctccagggagttcgaccagagaaattgcccccaatggtatttactttagactgtggtaactgaggtttaatcattcacagaactattctcttaacaatgttaattatccacaagtgtgtttactcaaagcttctgtgattaattctatactaaataaatgcctggagggtgagttgctcagggtgggcttccattctttacaggactctccgtggagtctgggagtggcctcggaccctctgctgctggcaaagcaggatatctgtgtgtcaggtagtttattcacccatcgccaggtctgcagttggagcccattgtgtgaggcagtctgtgaaggaagtgtgagaaccaccctcatgaggaaagctgtagaggaagagtgaggaatgcgacagactccctgaaagcaaaggtggaaaaagaattcacgtggtgaagtcagtgactaatcagtaagtcattggtgcccactcgaggttaccaagttctgg

SEQ ID NO: 45029 - DNA, 2300 bp, Homo sapien; identical to SEQ ID NO: 45018

SEQ ID NO: 45030 - DNA, 2300 bp, Homo sapien
cagatctgagatatgcaaagaaatggtaagcaaaatgttactacatatgtggatgggtctaaaaaaacgatgtctaatttatatggtgaaaccaggatagagctaaaatagtgaataacatataaactgagagaggggagggtgtccaaagctaaaacatcctaaaggcctttgtattattcaagaggagagtaaagctatgtattagctttatattttaagtttacattttcaaatagtaaaacagtcacttaaaaatatagactgcattactccaaataagttgaggaaaaaaataacgtgacaaaaagaaaaaacacaaaacaaaacacatacacacgtgagcatattactgttatcttctagtttctattgctactgagaagcttcttctgtaagttttaactttcttgtttgtatgccattcttattcaagataagtagtgttgtataaatttttactgtgagcgtgtccttaaaggatcattttctttcagcctaggttgtagaaggattcatccaagtcggctttatgtttgcttctgccaggcattctagatgccccatgtctaggatctctttaggcaggagagagggtgatggtgtaggaggacccatttcttggcttgcagattccaataatatgtcacagatttaaaccccaaactttgatgaaatgcaggtctagggttttaaaatataatgagagttaaatacgtattttcttcatccagagatggggcaagcttcctcatctgctcgttcatgggtgatttatattttccccactccatccttttcctaaggattttagggacaatggctttttgcagagtactcagttccagctcccaccttgagcccttacctcctgcccctaaacatccagacctcaagttagagagagtaacattttgcccacacctaggaggaccaatccttctggtttccttagggatgcaggaatttctcagtgctaaaaccagtaagtcctgggcaaacgagtatgactggctgccctacaacccagcccccatatccagggcaggagaacaatcatttgaacaattcattgctctggttttcagttgatttttggttcttggaatttcccttctttttttatgggcttatctgcctattggaaacaaaacgttatttttttttatcccgcattactagatgtcagtagtgagacacgtctcacgttatagcagtccagcattttgccagttcaaaaagtcacattttaattctttccgtcagtacagaagtgaagtttgaggataaaggtcatagccacgtagccctgtgtgcataaccaggtgctggagtggtccccaaagttatgtgattggctccaccacctgccccacagcttgctcccgctctaggcccttgctctgatcttgagaatgttctgtaagtctctaggcaggcctagcgtctttctgtaagtcctagaaggtgaagtcttccattaaaatgtaaaatccctgagcaaagagatattattttattctgttcactcctgcatctgcagtacctggtaatcacaggcactcagtaactatctcttgaaagaaggaacatcctgaatgtcaaaactggcgttccctcccatccaaccccttatatctcaaacttgacagaaaggagtccaagtttctggcctgttgatgtctccctccgttttccacagacttgctactatttatttctgcaggtactttaaaagattttggggtgggtgtgacgctaacagtgattgtgctaaacctgtgcattccggaagccattttgaaactacagcccagacacattatcattttttaaaactataccatatatttcagtatgcatacttatttcaagggtgttttggaggcggtgcctgcctggaacccaggcactggccagcacacacgcacggcataccctgcgtactctacgcacccacagcgtgggggacggccgtcatcccccgcaggcctccaccctccagggggcgggtgtgctgccacccattggctcaggccgataccacgcgccccgatacccggcacaggagccacctcccagagccccgcagtccatgcctcagtcggcctgcgctcctcagcctggcggttctacctccgagggttcgcccgcccttggttttccttacaccttagcctttggctcctttgaccactcgaagccccacagcgtgttccagcggacttcaccagcagacccagaagtggtgggtgaaacactgcctctgttcctccttgagcctgtcgggagctgctgcc

SEQ ID NO: 45031 - DNA, 2300 bp, Homo sapien
cacacaaggaaattataaagaatttgctacaggcgtaaggaaaatgattcagaaggcagatctgagatatgcaaagaaatggtaagcaaaatgttactacatatgtggatgggtctaaaaaaacgatgtctaatttatatggtgaaaccaggatagagctaaaatagtgaataacatataaactgagagaggggagggtgtccaaagctaaaacatcctaaaggcctttgtattattcaagaggagagtaaagctatgtattagctttatattttaagtttacattttcaaatagtaaaacagtcacttaaaaatatagactgcattactccaaataagttgaggaaaaaaataacgtgacaaaaagaaaaaacacaaaacaaaacacatacacacgtgagcatattactgttatcttctagtttctattgctactgagaagcttcttctgtaagttttaactttcttgtttgtatgccattcttattcaagataagtagtgttgtataaatttttactgtgagcgtgtccttaaaggatcattttctttcagcctaggttgtagaaggattcatccaagtcggctttatgtttgcttctgccaggcattctagatgccccatgtctaggatctctttaggcaggagagagggtgatggtgtaggaggacccatttcttggcttgcagattccaataatatgtcacagatttaaaccccaaactttgatgaaatgcaggtctagggttttaaaatataatgagagttaaatacgtattttcttcatccagagatggggcaagcttcctcatctgctcgttcatgggtgatttatattttccccactccatccttttcctaaggattttagggacaatggctttttgcagagtactcagttccagctcccaccttgagcccttacctcctgcccctaaacatccagacctcaagttagagagagtaacattttgcccacacctaggaggaccaatccttctggtttccttagggatgcaggaatttctcagtgctaaaaccagtaagtcctgggcaaacgagtatgactggctgccctacaacccagcccccatatccagggcaggagaacaatcatttgaacaattcattgctctggttttcagttgatttttggttcttggaatttcccttctttttttatgggcttatctgcctattggaaacaaaacgttatttttttttatcccgcattactagatgtcagtagtgagacacgtctcacgttatagcagtccagcattttgccagttcaaaaagtcacattttaattctttccgtcagtacagaagtgaagtttgaggataaaggtcatagccacgtagccctgtgtgcataaccaggtgctggagtggtccccaaagttatgtgattggctccaccacctgccccacagcttgctcccgctctaggcccttgctctgatcttgagaatgttctgtaagtctctaggcaggcctagcgtctttctgtaagtcctagaaggtgaagtcttccattaaaatgtaaaatccctgagcaaagagatattattttattctgttcactcctgcatctgcagtacctggtaatcacaggcactcagtaactatctcttgaaagaaggaacatcctgaatgtcaaaactggcgttccctcccatccaaccccttatatctcaaacttgacagaaaggagtccaagtttctggcctgttgatgtctccctccgttttccacagacttgctactatttatttctgcaggtactttaaaagattttggggtgggtgtgacgctaacagtgattgtgctaaacctgtgcattccggaagccattttgaaactacagcccagacacattatcattttttaaaactataccatatatttcagtatgcatacttatttcaagggtgttttggaggcggtgcctgcctggaacccaggcactggccagcacacacgcacggcataccctgcgtactctgcgcacccacagcgtgggggacggccgtcatcccccgcaggcctccaccctccagggggcgggtgtgctgccacccattggctcaggccgataccacgcgccccgatacccggcacaggagccacctcccagagccccgcagtccatgcctcagtcggcctgcgctcctcagcctggcggttctacctccgagggttcgcccgcccttggttttccttacaccttagcctttggctcctttgaccactcgaagccccacagcgtgttccagcggacttcaccagcagacccaga

SEQ ID NO: 45032 - DNA, 2300 bp, Homo sapien; identical to SEQ ID NO: 45018

SEQ ID NO: 45033 - DNA, 2300 bp, Homo sapien
tatatgtcaagtttaaattcaaaaaatatttttcagtcagtcgtggtggctcacacctgtaaccctagtacttcaggatcctgaggtggatggatcacttgaggtcaggggtttcaaaccagcctggtgaaactatgtctccactaaaaatccaaaaaaaaaaaaaaattttctggggatggtggtacatgcctgtaatgctacttgggaggctgaagccagacaagttcttgaatctgagatgtggaggctgcagtgatcccagattgtgtcaccacactgcaggtggagtgacaccgcaagattctgtctcaaaaacagacaaacagaaaaatattttttctttcttacaacaaaaagacacacatgtgttctagatatgccctggtggagtggagtgggtgtggagcctgtctttgtaaagaaggaagaagggccagtacccaggattatgtgtgaaggatgaattggcacacaaataaaggggcagccaggcccttggcctagcaacactgaagcttacaggtggcttcggaaagcaggataaatagcccgtggacttaatgctagatggctctgtaacaatgaaacatctgcccagggatcttagcaatcctgctagaaggccctgactataccctggattggagatacctgaggtagagtggctgccagagagcctgagcaaacaccagttttgaccactatggctgggtcaatctaaaatagcttatctcttctgatttacaatacaaaatatagaaaaataaagtgaaaaaagtaaaatcaagagaaaaaaattaaaaaataagtttaaagtaattaaaaatagtaaagacaaataaactgaaacaaaatagagaaaaataaagagaaatgtaattaagatcagggaaagtaaataaaatgaagatgaagaaaataaatacaataaaattaagagaaataaacagaaatgaaacaatttgcaatagaataaaataaaactttatgaatcaggagaaaaaataaaagtaaaaataaagataaatatggagaaataaaataaaataatataaagggataagaatgggagtaaataagataaaaaagaaattaaataaaatgtttcaaacaagacacaaattggagaacatttgaaatgaagagacaataatataaaaaataaaagatagaaacaaatttaaatgcatagaaaaaatgaaagtaaataaaaaataaaaaagaaaaagaaaaatatatagaaaaataaaagttaaagagcaaaataagacctggggataatctacaaaatgtttcacccaacaattgcatagtacatatttctatatacatttggcatgttttcttagataggcaaacttttaagctagaatgcaagttttagcatatttaaactgacggtaatcacaaaaaatattatttctgactacaataaaatataactggaagtaaaaaccaaaagaaaactagtatatctgcatatacatgaaacctagacaaattcttgagcatactatttttcaagagttagaataggcaagtttctttagatgttaattgtttggattcactcaggccgctggcagaaatattacagggaagtattaggaaaagttataaggaatagtaacaaacctttttggcaggctaaaaggctaaaattattatatagcttgtaataattgaacaggctgaaggcaacctcttcttaccttaaagcattaggtcatagggtaaatactagggacaactgaggcttctccagttaagtctgtttactctacctccactaactaagatggctctctccagggagttcgaccagagaaattgcccccaatggtatttactttagactgtggtaactgaggtttaatcattcacagaactattctcttaacaatgttaattatccacaagtgtgtttactcaaagcttctgtgattaattctatactaaataaatgcctggagggtgagttgctcagggtgggcctccattctttacaggactctccgtggagtctgggagtggcctcggaccctctgctgctggcaaagcaggatatctgtgtgtcaggtagtttattcacccatcgccaggtctgcagttggagcccattgtgtgaggcagtctgtgaaggaagtgtgagaaccaccctcatgaggaaagctgtagaggaagagtgaggaatgcgacagactccctgaaagcaaaggtggaaaaagaattcacgtggtgaagtcagtgactaatcagtaagtcattggtgcccactcgaggttaccaagttctgg

SEQ ID NO: 45034 - DNA, 2300 bp, Homo sapien; identical to SEQ ID NO: 45016

SEQ ID NO: 45035 - DNA, 2300 bp, Homo sapien
attgagataatcatgtggtttttgcctttgtttcttttctgtttatatgccggattacgtgtattgattttcatatgttgaaacagccttgcatcccagggatgaagcccacttgatcattgtggataagctttttgatgtgctgttggatatggtttgccagtattttattgaggatttttgcatagatattcatcagggatattgttctaaaattctcttttttggttgtgtctctgccaggctttggtgttagggtgatgttggcctcataaaatgagttagggaggatttcctctttttctattgattggactagtttcagaaggaatggtaccagctcctccttgcacctctggtagaattcggctgtgaatccatctggtcctggacttttttttgttggtaagctgttaattattgcctcaaattcagagcctattattggtctattcagagattcaacttcttcccggtttagtcttgggagggtgtatgtgtcaaggaatttatcaatttcttctagattttctagtttatttgcctagaggtgtttgtagtattctctgaaggtagtttgtatttctgtgggatcagttgtgatatcccctttatcattttttattgcatctatttgattcttctctcttttcttctttattagtcttgctagtggtctatcagttttgttgatcttttcagaaaaccagctcctggaatcattggttttttgaaaggctttttatgtctctatctccttcaattctgctctgaccttagttatttcttgccttctgctagcttttgaatgtgtttgctcttgcttctctagttcttttaattgtgatgttagggtgtcaattttagatctttcctgctttctcttgtgggcatatagtgctataaatatccatctacacactgctttaaatgtgtcccagagattctggtatgttgtgtgtttgttcttattagtctcaaggtacaactttatttctgacttcatttcgttaggtacccagtagtcattcaggagcaggttgttcagtttccatgtaattgagaggttttgagtgagtttcttaatcctgagttctagtttgattgcactgtggtctgagagacattttgttataatttctgtttttttacatttgctgaggtgtgctttacttccaactatatggttgattttggaatggttggggtgtggttctgagaagaacgtatattctgttgatttggggtggagagttctgtagacatctattaggtccgcctggtgcagagctgaattcaattcctacaataataacaggagactttaacaccccactgtcaacattaggcagatcaatgagacagaaagttaacaaagataccttcaatttctttaatgattttatggaattgctattttacattctcctgtctttatctctacatgttcaattagaaaatcctcagtgaatacttttcagtatgatagagaaaatattgtgcaattaattactgatagatacacagtgaagtaatttctggttttcatttggtgctctcacactgaggatagaaaagtcttggttgtaatcttacatgatgaggagttctactatgctgttttcttttgctctgtgatctactgtcacagttgtttgaacttgccactgaaaaaagtgggaaattgtttccctcatgtctactcatctccctttcataggttttctggtggtgtattgtctagatggcttagtagctcatgatcacagaggtcatatttgacaagagaaagctttgttgctccaggactaagtgaaggtgtttaccacctagtgcctaaggtttctccagagccacgatggagcttaaaaaccattactgaaaccagaaagtgatggcagacattgagggctgcccagagtagaaagcaaaatgctcccttttgctttacaagtggtcactgcttatttggtcattaatgttgcttctgaccatgacgtgtttcttgttcatctttcttggtattccactgaaggtgcatctaaggaaacgagccctgtgtgatagtggtaaagagaacaactgcatccttctgtagctgatgccttgttgagctttgaagcacattgagaagaatctgaaatccttcctcattatggggtaagttgtgtcaaatttgactcccatgtaaatggcagcaggttcacgatgtcaaagaagaaactcagaatcagtaaataggatatggagttttactggcgacttacatagaggggagaaagtccagtgtcagtgggctt

SEQ ID NO: 45036 - DNA, 2300 bp, Homo sapien; identical to SEQ ID NO: 45025

SEQ ID NO: 45037 - DNA, 2300 bp, Homo sapien
ggcctctcatcccctccaggaacaccactgaggcctgacaccaggggccgccaatgcctccctgctgggctggctgtatggaagacctcagtgtcaatggccagaggtgggggcttcgggaagccttgctgacacacaacatggcggcaggctgcagactggaggaggtggaggagtatgaggacaatacctatggccattatgaagctttctccaccctggcccccagggcttggctgtccatggatctagctgagccatgcatgcttgagccagggctgcctcctgtctttaccaatttcacccagctgctgactatcagcccagtggtggtgaccgagggtggcacagccgagtggtggcatgtgcagcccatgctggccctgatggaggctgaactgcataaatcccaggtgctgttcagcgtgacctgaggggcacactacagtgaactcgagctggacatcctgggtgcccaggcatgagaaatgttcaccctcctggacatggtgaactgcaaggcctgcttcatccatgatggccctggtgctggaggtgttggtgatggcttgggtgcccatgccttcatgcctgcggaggggccaaactgacctcctgcccatccaggtcaaccctgtcaatgacccaccccgtatcatcttcccatgtggcagccttatggtgatcctggaacacacacagaagcctctggggcctgaggttttccaggcctatgacctggactctgcctgtgagggcctcaccttccagctccttggcacctcctctggcctccctgtggagcactgagaccaggctggggagccggtgacccagttctcctgctgggagttggaggccgacagcctagtctatgtccactgcagtggccctgcataggacttgacgttccgggtcagcaatggactgcaggccagccccccgtccatgctgaaggtggtggccatccagccggccatacagatccactgcagcacagggctgcatctggcccaggactctgccatgcccatcttgcctaccaacctgtcggtggagaccagcaccgtggggcaggatgtgactgtgttgttctgtgtcaccagaggcctgcagttcagggaggtgcagaagcagggggctggtggggtggagggtgctgagtggtgggccacacagtcattccaccagcaggatgtggagcagggccacatgaggtacctgagcactaacccacagcactatgccgaggacaccgtgaagaacctggatctgcaggtgcaggtgagctgggaaatcctgagcaatctgtccttcctagtgaccatccagagagccactgtgtggatgctgcagctgcggccactgcacactcaacacccagcagaggccctcaccacagcccacctggaggccaccctggaagaggcaggcccaagccccccaaccttccactctgaggtggttcaggctcccaggaaaggcaaccttcaactacagggcacgacactgtcagatggtcagggcttcacccaggatgatgtacaggctggagaggtgacctatagggccatggcacatgcctcagtggcagtggaggacaccttctgtttccatgtcacagctccactatatttctccccactctgtactttctccatccatactggcggtgacccagacatgcctgtcctcaccaatgtcctcttggtgcccgagggtggtgggtgtgtcctctctgctgaccagctcttcgtcaagagcctcaacagtgccaggtacctctatgaggccatgtagtggccccgccatgggaggttgacttggtgtggggcacaggacaagaccactatggtgacttccttcaccaatggagatctgttgcatggccagccggtctagcagcatgatgactccaagatcacggaagatgatatgccatttgctgctgccaccaggaccagagcagtggtgatgtggcctgggaggaggtacggggtgtcttctgagtggccatccagactgtgaatgaccacgcccctgtgcagagcatcagctgcgtcttccatgtggcctggggtaggtggcagctgctgactccacacaacatggccttcagcaatgctgattcaggctttgtggatgcccagctggtgctgacccacaaggacctcctgtctggcagtatcatggccacggatgagcccatgcagcccatcttctgcttcatccaggaggggcctcaggaagaggcgagtcctgttcacgcactcaggctgaccatggctggatcctgctgc

SEQ ID NO: 45038 - DNA, 2300 bp, Homo sapien; identical to SEQ ID NO: 45023

SEQ ID NO: 45039 - DNA, 2300 bp, Homo sapien
tactttttttttttttttttttttttttgagacggagtctcgctctgtcgcccaggctggagtgcagtggcgggatctcggctcactgcaagctccgcctcccgggttcacgccattctcctgcctcagcctcccaagtagctgggactacaggcgcccgccactacgcccggctaattttttgtatttttagtagagacggggtttcaccgttttagccgggatggtctcgatctcctgacctcgtgatccgcccgcctcggcctcccaaagtgctgggattacaggcgtgagccaccgcgcccggcccagaagaagaatactttaagtgtggtcatgttttattttacccttgtgacattttctttgtcaataggtactaccttgtcctagttcataaaaatttgtgagatttcaagaagagcataaagtaatttatttattctttctcaaaatgcagagacagtaaaaattaaccattttacgggctttaatacaaagtttactaaaaaacaaatactgatcaaaatataaataaataccatttatgaacacttctaagttaaaacgaatatttttgttaaaattttctgggaagattagccacaacaagagtaatgcagtcttctcttttcttttcttaccttttttctttctctttctttctctttttctttctttctttctctctttttctttctttctttctttgttttctttcttcctttctttcttcctttgttttttctctttcttttcttcctctcttctttcctttctttctttccttttttttttttttttttttgatggtgtttcactcttgttgcctcggctggagtgcaatggttgtgattttggctcactgcaacttccaccccaggagttcaatcgattctcctgcctcagcctcccaagtagctgggattacagtcatgtgccaccacacctggttaattctgtatttttggtagagacaaggtttcaccttgttagccagggtggtctggatctcctgacctcacgatccaccctcctcagcctctcaaagtgctgggattattttgagtcatggcacccagccaggttaatcatttaaaagattttagtgtgctataacatttagcatgacttctcaccaagttcatgtagccaaaaattggaattacctaaattacagcagttgtccagagtaacagctctatttctcagaaaccttatttttttatgccagaaacaatcaaagacagggtaaaaatgtaaaaaacaagcagattttaattctacacattcttcacctttaatgtttgatagcttaatttcttgctgagataaagatattgccatatttttaataggaattcttaaatattacaaccaatatacatacttttcatatgtcacaatgtttggagcatgggaagttgtatttttttgtgctgggggcacttttgtggtagaatttactaagggatgcttctaaaatttgcttcacctaattccagtaaagtgcatattatcagaatccacagtactttgaagcaccattgtgccaagatttctgactgttttgctagccagtcacaattttccttgaaagcagtaagtctcctagtttatttctatattattttaaagcttttgtcattagatgtagggtttactgaagataaaagtgccttctgattttaaataattaatataattttttatttgatgtaatatctctatgcccctgttggaaacagtaggatatgaagtgtgttgcatagtgtgaggatcagcaattcatttgtttgaaccggttacaatatactatgtttttatctttttatagtatataagcattagcattgaacaccatgaatgcaaaatgcagtctacattagtcaagacctataaatacactatcagggctactgatattggtatattgtaatccaactatgtcatgtgtcttcctatatggactattgttatttgcagtctatgtttctcttctggcctagacttagattttggaatttctgttccttagaaagtacaagagaagcatatttagattaatcccatttctgcattactgctgcacctctttaaggttgccacttcaagggactacatcatgatgtcctgtttctaatgacctcccaatcatcctgcagaagattcttcaaatggggatcaacatgtccttatttaaggtaccccttaaatttctactattaagtggatgccaggatatgattcagcccattgaaagtccgtgtatcacatactggcatctgtttgaaagtcca

SEQ ID NO: 45040 - DNA, 2300 bp, Homo sapien; identical to SEQ ID NO: 45003

SEQ ID NO: 45041 - DNA, 2300 bp, Homo sapien
atgaagaggagtgtagttgaatggaatggaatggtatggaacgtactggaatggaatggataagaatggaatggaatggaatcgcatggaattgaatagaatcaaatcgaattgaatagaatcaaatggaaaaaatagagtcaaatggaatcaaatgtcatagaatcgcacggttttgaatgtcagtgaatggaaacgaatggaatgcgatgaagtggagcggagtggagttgaaaggagtgcaatggaatagggtggaagagaatttaatggaacagagtggattggagtggactggagtggaatggaaagggaaggaatgggattgaaaggagaggcgtgcagtggagtggagtggcatggagtggagtggagtcgaatggagtggaatggagtggattggaatggaatggagtgcagaggaatggaatggaatggtatagagtggacaggaatggagtggagtggattggaatggaatggaatgtaagggaatggaactgaatggactggaatggaatggaatagaatggaatcgcagggaatcaaattggattgaatcgaatcgaatggataaaatgaaatcaaatgaaattgaatggaatcgaattgaatgtaaacaatggaatccaaaggagtcaaatggaattgaatcaaatggttttgaatggcatcaaatgaaatggcatggaaggcagtgaattggagtggaatggaatagagaggaacgaattggaatggagggtagtggaatggagtggattccagtggagtggagtggattggattggaatggaatggaatagattggattggagtggtgcagagtggagtggactggagtgcagaggaatggagtggagtgaagtccagttgagtggaatggaatggagtggagcagagtggaatgcaaaagaatgaaatggattggtatggaatggaatggcgtggaatggcgtggaatagaatggaatggaatcgcatggaatgatatcaaatcaaatcaaatcgaacggaaaataatgaatccaatggaagcgaaaggattctaaaggaatggattcgaaatgcattgaatggaatggaaaggaatgcagtgaagtggagtggagtggaatgttttagagtgaactggggtggattggaactttatggagaggagtggagtgaagcgaacttggagcggaatggagtgcaatggactggagtggagtggaatggattagagtggagtggagtggatcggagtggagtgccgtccagtgaactaaaatgagttggaatgaattgcattcaagtgatatgaagtgaattgatttgggatgaattgaattgaaagcaactaaatcgcatggtaatgagtgaaatggaatcaaatggaatggaaataatggaatcgaaggcaaacgaatggaatcgaattgcactgattctactgacttcgaacaaaatgaaatgaaacgcggtgaagtgtagtggagtggaatgtattgggtggaatggaattgaatggtgtggagtggagtggagtgcccaggagtggaatgggaagaaatggaattgaacggagaggagtggagtggaatggggcataatggagtggaatagtgtagagtagagtagagtggaatgggttggagtggaatgcagaggacaggagtggagtgtggttgactggagtggagtggagttgagtggaggggattggattgaaatagaggggagcagagttgaatggaattgagtcacatggtaatgaatcacatcgaatggctttaaatcgaatgaaaaaatggaatcaaatgcaaacgaatggagtcaaaccacattggttaaactgacatcgaataatatcaaatgaaatgtggtgaagtggagtgcagtgtaacgaaatggggtttaatgaaattgaatggattggagtggattggagtctactggagtggaatggaatggaatggaaaggaatggaatagaatggagtgaagtgcagtgcagtgaaatggagtggaaaggaatggaatggaatggaatggaatggaatggaatggaatcaaatggaatcgaagtgaatcgaatctaatgaaattgatcggaaaaaatggaatggagtagaatcgaataagatggattcaacaggcaacaaatagaattgaatggaatgcggtgagttggagggcattggaatggagttgaatggaatggggtgtaattgaattgaatggagtagagtggattggagtggactggagtggaatggagcggaatgggcaggaatggaattgaaaggggtgaattgg

SEQ ID NO: 45042 - DNA, 440 bp, Homo sapien
gaattccattccattccaatccattcctttcctttcgcttgcattccattctattctcttctactgcatacaatttcactccattcgttcccattccattcaattccattccattcaattccattccatttgtttccattctcttcgattccatttctttatattccatgccattcgattccattctattgggttgcattacattcgtgttcattccattccagaccattccatttgactccattcctttcgagccctttcaatttgagtccattcctttccagtccatttcactccagtccattactatccattccataccattccatcccattccattacattccattccattacattccattccattccattccattgcattccattccattccattccattgcactgcactccattccattacattctactctatc

SEQ ID NO: 45043 - DNA, 2300 bp, Homo sapien
tccattccattccattgcattccattccattccattccattgcactgcactccattccattacattctactctatctgagtcgattttattgcattagattctattccattggattactttccattcgattacattccattcatgtacattccattccagtcaattacattcgagttcattacgttacattccagtatattccattgtattcgatcccattcctttcaattccatttcattcgactccattatattcaattccattccactcgaatccattccattagaggacattccattccaatgcattccattccattccatagcattccattgcattcgattccattccatttgatgccattccatttgatgcaatcccatgacattccattccattcgagtccattccgttccaattcattccattccgtttcatgaaattcgagtcctttccagtacatttcattccaatcccatccaatcccatctactccattcaattcctttccattccatttgatttgattccattgatttgattccattcagtttgattccattccgtgaaatttcgttccattctattccattgcattactttccattcaattccattccatttcatttcagtccattcgcttcctttcctttcgattcaattccatttgattccactccattctatgcgatttcattccaatcgattcaattccattcgatgacattcctttcgtttccattccattcgagtccatttaatttgagcattcgtgtccgttctattcgagtccattccattacagtctattctattcccttccattcgtgttgattcaatttcattcccttccattcgattcctttccattcgattccattcctttccattccattccattcgttcccattccatgtgatttcattccattccagtccattatattcgagtccactccactccattctattacattcaattccttttgagtccgttccataacactccattcatttcgattccatttcttgccagttttcttccattttattccattccgttcgattccattccattcgattgcattccattcgaatcctttccattccatttcattccattcctttctattccattccatttcattcgatttgattccattctgttctattccattcaattctttttcattccattcgaatcctttctattgcagtccattccattcgagtccattccaatcccttccattccattccattacagtccattccaatagattccattcctttgccttccattcgaatccattccattctagtccattccatttgagtcaattccattccattccattctattcctttccaatccattcgattccattcgattcaattccatttgattctctttcattctattttattccatgccatttgattgcattgcattccattccgtttgattccagtccatccaagaaagttccattccagtccagtgctttccagtccattccattccactctagtctattccactccattcccttccattgcattccatactattccattccattcctttgcattccgtttacaatctattcgagtccattgcattccagtccaatccattcgattacattccttttgattccctgccagtcgattgcattgcatactacaccattccaaaggagttcattccattctatctccacactttccattccactctgtttgagtccattccattccagtccatttaattcaagggcattccattccattccattccattccatttcatattattccattccattcaattccattccagatgattccattccattctataccattgctctctgttccattccattccatctgtctccattcctttcgtttcgattcctttccattccattccattacatttgatcctattttattaaattgcattctattcgagtgatttccattcgagtcctttccattcgattccattccattctattccattcctttggattccattccattccgttccgttcacatcaattcctggcgattccattacattcgatttcttgccattcgattccattccttttgactccatttcattcgattccattccattccattaatttccattccattcgagacctttccattgcagtcttttcccttcgagtccattccgttcgattccattccgttcgattcccttccattcgattccattccattggagtccgtaccagtcgagtccattctattccagtccatt

SEQ ID NO: 45044 - DNA, 2300 bp, Homo sapien
cattccattccattctattcctttccaatccattcgattccattcgattcaattccatttgattctctttcattctaatttattccatgccatttgattgcattgcattccattccgtttgattccagtccatccaagaaagttccattccagtccattgctttccagtccattccattccactctagtctattccactccattcccttccattgcattccatactattccattccattcctttgcattccgtttccaatctattcgagtccattgcattccagtccaatccattcgattacattccttttgattccctgccagtcgattgcattgcatactacaccattccaaaggagttcactccattctatctccacactttccattccactctgtttgagtccattccattccagtccatttaattcaagggcattccattccattccattccattccatttcatattattccattccattcaattccattccagatgattccattccgttctataccattgctctctgttccattccattccatctgtctccattcctttcgtttcgattcctttccattccattccattacatttgatcctattttattaaattgcattctattcgagtgatttccattcgagtcctttccattcgattccattccattctattccattcctttggattccattccattccgttccgttcacatcaattcctggcgattccattacattcgatttcttgccattcgattccattccttttgactccatttcattcgattccattccattccattaatttccattccattcgagacctttccattgcagtcttttcccttcgagtccattccgttcgattcccttccattcgattccattccattggagtccgtaccagtcgagtccattctattccagtccattagtttcgactccattgcattcgagtgcattccattccgtggctgtccattccattccgtttgatgccattccatacgattccattcaattcgagaccattctattcctgtccattccttgtggttcgattccatttcactctagtccattccattccattcaattccattcgactctattccgttccattcaattccattccattcgattccatttttttcgagaaccttgcattacactcccttccattccagtgcattccattccagtctcttcacttcgattccattccattcgtttcgattcctttccattccagcccattccattccattccattcctttcctttccgtttcattagattccattgcattccattccattcaattcaattccgtgctattcaatttgattcatttccatttaattccattccattagattccattccgtacgattccattccttttgaatccattccattggagtccattcacttccagaacattccattccagtcgaatccattcgagtacattccattaaagttcattacattctaatacattccattccattgcattccattccattccattcgatgccattcgattccattccatgccaaatcattgcattcctttccattccgttcctatcaattccattccattcgatttagttcgattctattcacttccattccattcgattccattccattggagtcaattcctttcgacacccagcctttccagtcaatgattttggattccatttttttgcattccattacattctatgacattcgattccgtttcattgcattccattccatacatttttattccattcgagaccgtagcattccactttattccaggcctgtccattacactacattcccttccattccaatgaattccattccattccaatccattcctttcctttcgcttgcattccattctattctcttctactgcatacaatttcactccattcgttcccattccattcaattccattccattcaattccattccatttgtttccattctcttcgattccatttctttatattccatgccattcgattccattctattgggttgcattacattcgtgttcattccattccagaccattccatttgactccattcctttcgagccctttcaatttgagtccattcctttccagtccatttcactccagtccattactatccattccataccattccatcccattccattccattccattccattccattccattccattccattgcattccattccattccattccattgcactgcactccattccattacattctactctatctgagt

SEQ ID NO: 45045 - DNA, 2300 bp, Homo sapien
aaatggagtcaaaaggaatggaatcgaatggcaagaaatcgaatgtaatggaatcgccaggaattgatgtgaacggaacggaatggaatgggatccaaaggaatggaatagaatggaatggaatcgaatggaaaggactcgaatggaaatcactcgaatagaatgcaatttgataaaataggatcaaatgtaatggaatggaatggaaaggaatcgaaacgaaaggaatggagacagatggaatggaatggaacagagagcaatggtatagaatggaatggaatcatctggaatggaattgaatggaatggaataatatgaaatggaatggaatggaatggaatggaatgcccttgaattaaatggactggaatggaatggactcaaacagagtggaatggaaagtgtggagatagaatggaatgaactcctttggaatggtgtagtatgcaatgcaatcgactggcagggaatcaaaaggaatgtaatcgaatggattggactggaatgcaatggactcgaagagattggaaacggaatgcaaaggaatggaatggaatagtatggaatgcaatggaagggaatggagtggaatagactagagtggaatggaatggactggaaagcaatggactggaatggaactttcttggatggattggaatcaaacggaatggaatgcaatgcaatcaaatggcatggaataaaatagaatgaaagagaatcaaatggaattgaatcgaatggaatcgaatggattggaaaggaatagaatggaatggaatggaattgactcaaatggaatggactagaatggaatggattcgaatggaaggcaaaggaatggaatctattggaatggaatggaagggattggaatggactcgaatggaatggactgcaatagaaaggattcgaatggaatgaaaaagaattgaatggaatagaacagaatggaatcaaatcgaatgaaatggaatggaatagaaaggaatggaatgaaatggaatggaaaggattcgaatggaatgcaatcgaatggaatggaatcgaacggaatggaataaaatggaagaaaactggcaagaaatggaatcgaaatgaatggagtgttatggaacggactcaaaaggaattgaatgtaatagaatggagtggagtggactcgaatataatggactggaatggaatgaaatcacatggaatgggaacgaatggaatggaatggaaaggaatggaatcgaatggaaaggaatcgaatggaagggaatgaaattgaatcaacacgaatggaagggaatagaatagactgtaatggaatggactcgaatagaatggacacgaatgctcaaattaaatggactcgaatggaatggaaacgaaaggaatgtcatcgaatggaattgaatcgattggaatgaaatcgcatagaatggagtggaatcaaatggaattgaatcgaaaggaaaggaagcgaatggactgaaatgaaatggaatggaattgaatggaaagtaatgcaatggaatagaatggaacgaaatttcacggaatggaatcaaactgaatggaatcaaatcaatggaatcaaatcaaatggaatggaaaggaattgaatggagtagattggattggatgggattggaatgaaatgtactggaaaggactcgaatttcatgaaacggaatggaatgaattggaacggaatggactcgaatggaatggaatgtcatgggatggcatcaaatggaatgacatcaaatggaatggaatcgaatgcaatggaatgctatggaatggaatggaatgcattggaatggaatgtcctctaatggaatggattcgagtggaatggaattgaatataatggagtcgaatgaaatggaattgaaaggaatgggatcgaatacaatggaatatacaggaatgtaacgtaatgaactcgaatgtaattgactggaatggaatgtacatgaatggaatgtaatcgaatggaaagtaatccaatggaatagaatctaatgcaataaaatcgactcagatagagtagaatgtaatggaatggagtgcagtgcaatggaatggaatggaatggaatgcaatggaatggaatggaatggaatggaatggaatggaatggaatgggatggaatggtatggaatggatagtaatggactggagtgaaatggactggaaaggaatggactcaaattgaaagggctcgaaaggaatggagtcaaatggaatggtctggaatggaatgaacacgaatgtaatgcaacccaatagaatggaatcg

SEQ ID NO: 45046 - DNA, 2300 bp, Homo sapien
aaggaaaggaatggattggaatggaatggaattcattggaatggaagggaatgtagtgtaatggacaggcctggaataaagtggaatgctacggtctcgaatggaataaaaatgtatggaatggaatgcaatgaaacggaatcgaatgtcatagaatgtaatggaatgcaaaaaaatggaatccaaaatcattgactggaaaggctgggtgtcgaaaggaattgactccaatggaatggaatcgaatggaatggaagtgaatagaatcgaactaaatcgaatggaatggaattgataggaacggaatggaaaggaatgcaatgatttggcatggaatggaatcgaatggcatcgaatggaatggaatggaatgcaatggaatggaatgtattagaatgtaatgaactttaatggaatgtactcgaatggattcgactggaatggaatgttctggaagtgaatggactccaatggaatggattcaaaaggaatggaatcgtacggaatggaatctaatggaatggaattaaatggaaatgaatcaaattgaatagcacggaattgaattgaatggaatcgaatgcaatggaatctaatgaaacggaaaggaaaggaatggaatggaatggaatgggctggaatggaaaggaatcgaaacgaatggaatggaatcgaagtgaagagactggaatggaatgcactggaatggaagggagtgtaatgcaaggttctcgaaaataatggaatcgaatggaatggaattgaatggaacggaatagagtcgaatggaattgaatggaatggaatggactagagtgaaatggaatcgaaccacaaggaatggacaggaatagaatggtctcgaattgaatggaatcgtatggaatggcatcaaacggaatggaatggacagccacggaatggaatgcactcgaatgcaatggagtcgaaactaatggactggaatagaatggactcgactggtacggactccaatggaatggaatcgaatggaagggaatcgaacggaagggaatcgaacggaatggactcgaagggaaaagactgcaatggaaaggtctcgaatggaatggaaattaatggaatggaatggaatcgaatgaaatggagtcaaaaggaatggaatcgaatggcaagaaatcgaatgtaatggaatcgccaggaattgatgtgaacggaacggaatggaatgggatccaaaggaatggaatagaatggaatggaatcgaatggaaaggactcgaatggaaatcactcgaatagaatgcaatttgataaaataggatcaaatgtaatggaatggaatggaaaggaatcgaaacgaaaggaatggagacagatggaatggaatggaacagagagcaatggtatagaatggaatggaatcatctggaatggaattgaatggaatggaataatatgaaatggaatggaatggaatggaatggaatgcccttgaattaaatggactggaatggaatggactcaaacagagtggaatggaaagtgtggagatagaatggaatgaactcctttggaatggtgtagtatgcaatgcaatcgactggcagggaatcaaaaggaatgtaatcgaatggattggactggaatgcaatggactcgaagagattggaaacggaatgcaaaggaatggaatggaatagtatggaatgcaatggaagggaatggagtggaatagactagagtggaatggaatggactggaaagcaatggactggaatggaactttcttggatggattggaatcaaacggaatggaatgcaatgcaatcaaatggcatggaataaaatagaatgaaagagaatcaaatggaattgaatcgaatggaatcgaatggattggaaaggaatagaatggaatggaatggaattgactcaaatggaatggactagaatggaatggattcgaatggaaggcaaaggaatggaatctattggaatggaatggaagggattggaatggactcgaatggaatggactgcaatagaaaggattcgaatggaatgaaaaagaattgaatggaatagaacagaatggaatcaaatcgaatgaaatggaatggaatagaaaggaatggaatgaaatggaatggaaaggattcgaatggaatgcaatcgaatggaatggaatcgaacggaatggaataaaatggaagaaaactggcaagaaatggaatcgaaatgaatggagtgttatggaacggactcaaaaggaattgaatgtaatagaatggagtggagtggactcgaatataatg

SEQ ID NO: 45047 - DNA, 2300 bp, Homo sapien
tattcctttccaatccattcgattccattcgattcaattccatttgattctctttcattctattttattccatgccatttgattgcattgcattccattccgtttgattccaatccatccaagaaagttccattccagtccattgctttccagtccattccattccactctagtctattccactccattcccttccattgcattccatactattccattccattcctttgcattccgtttccaatctcttcgagtccattgcattccagtccaatccattcgattacattccttttgattccctgccagtcgattgcattgcatactacaccattccaaaggagttcattccattctatctccacactttccattccactctgtttgagtccattccattccagtccatttaattcaagggcattccattccattccattccattccatttcatattattccattccattcaattccattccagatgattccattccattctataccattgctctctgttccattccattccatctgtctccattcctttcgtttcgattcctttccattccattccattacatttgatcctattttatcaaattgcattctattcgagtgatttccattcgagtcctttccattcgattccattccattctattccattcctttggatcccattccattccgttccgttcacatcaattcctggcgattccattacattcgatttcttgccattcgattccattccttttgactccatttcattcgattccattccattccattaatttccattccattcgagacctttccattgcagtcttttcccttcgagtccattccgttcgattcccttccgttcgattcccttccattcgattccattccattggagtccgtaccagtcgagtccattctattccagtccattagtttcgactccattgcattcgagtgcattccattccgtggctgtccattccattccgtttgatgccattccatacgattccattcaattcgagaccattctattcctgtccattccttgtggttcgattccatttcactctagtccattccattccattcaattccattcgactctattccgttccattcaattccattccattcgattccattattttcgagaaccttgcattacactcccttccattccagtgcattccattccagtctcttcacttcgattccattccattcgtttcgattcctttccattccagcccattccattccattccattcctttcctttccgtttcattagattccattgcattcgattccattcaattcaattccgtgctattcaatttgattcatttccatttaattccattccattagattccattccgtacgattccattccttttgaatccattccattggagtccattcacttccagaacattccattccagtcgaatccattcgagtacattccattaaagttcattacattctaatacattccattccattgcattccattccattccattcgatgccattcgattccattccatgccaaatcattgcattcctttccattccgttcctatcaattccattccattcgatttagttcgattctattcacttccattccattcgattccattccattggagtcaattcctttcgacacccagcctttccagtcaatgattttggattccatttttttgcattccattacattctatgacattcgattccgtttcattgcattccattccatacatttttattccattcgagaccgtagcattccactttattccaggcctgtccattacactacattcccttccattccaatgaattccattccattccaatccattcctttcctttcgcttgcattccattctattctcttctactgcatacaatttcactccattcgttcccattccattcaattccattccattcaattccattccatttgtttccattctcttcgattccatttctttatattccatgccattcgattccattctattgggttgcattacattcgtgttcattccattccagaccattccatttgactccattcctttcgagccctttcaatttgagtccattcctttccagtccatttcactccagtccattactatccattccataccattccatcccattccattccattccattccattccattccattccattccattccattccattgcattccattccattccattccattgcactgcactccattccattacattctact

SEQ ID NO: 45048 - DNA, 2300 bp, Homo sapien
tccattccattccattgcattccattccattccattccattgcactgcactccattccattacattctactctatctgagtcgattttattgcattagattctattccattggattactttccattcgattacattccattcatgtacattccattccagtcaattacattcgagttcattacgttacattccagtatattccattgtattcgatcccattcctttcaattccatttcattcgactccattatattcaattccattccactcgaatccattccattagcggacattccattccaatgcattccattccattccatagcattccattgcattcgattccattccatttgatgtcattccatttgatgccatcccatgacattccattccattcgagtcaattccgttccaattcattccattccgtttcatgaaattcgagtcctttccagtacatttcattccaatcccatccaatcccatctactccattcaattcctttccattccatttgatttgattccattgatttgattccattcagtttgattccattccgtgaaatttcgttccattctattccattgcattactttccattcaattccattccatttcatttcagtccattcgcttcctttcctttcaattcaattccatttgattacactccattctatgcgatttcattccaatcgattcaattccattcgatgacattcctttcgtttccattccattcgagtccatttaatttgagcattcgtgtccattctattcgagtccattccattacagtctattctattcccttccattcctgttgattcaatttcattcccttccattcgattcctttccattcgattccattcctttccattccattccattcgttcccattccatgtgatttcattccattccagtccattatattcgagtccactccactccattctattacattcaattccttttgagtccgttccataacactccattcatttcgattccatttcttgccagttttcttccattttattccattccgttcgattccattccattcgattgcattccattcgaatcctttccattccatttcattccattcctttctattccattccatttcattcgatttgattccattctgttctattccattcaattctttttcattccattcgaatcctttctattgcagtccattccattcgagtccattccaatcccttccattccattccattacagtccattccaatagattccattcctttgccttccattcgaatccattccattctagtacattccatttgagtccattccattccattccattctattcctttccaatccattcgattccattcgattcaattccatttgattctctttcattctattttattccatgccatttgattgcattgcattccattccgtttgattccagtccatccaagaaagttccattccagtccattgctttccagtccattccattccactctagtctattccactccattcccttccattgcattccatactattccattccattcctttgcattccgtttccaatctattcgagtccattgcattccagtccaatccattcgattacattccttttgattccctgccagtcgattgcattgcatactacaccattccaaaggagttcattccattctatctccacactttccattccactctgtttgagtccattccattccagtccatttaattcaagggcattccattccattccattccattccatttcatattattccattccattcaattccattccagatgattccattccattctataccattgctctctgttccattccattccatctgtctccattcctttcgtttcgattcctttccattccattccattacatttgatcctattttattaaattgcattctattcgagtgatttccattcgagtcctttccattcgattccattccattctattccattcctttggattccattccattccgttccgttcacatcaattcctggcgattccattacattcgatttcttgccattcgattccattccttttgactccatttcattcgattccattccattccattaatttccattccattcgagacctttccattgcagtcttttcccttcgagtccattccgttcgattccattccgttcgattcccttccattcgattccattccattggagtccgtaccagtcgagtccattctattccagtccatt

SEQ ID NO: 45049 - DNA, 2300 bp, Homo sapien
tattcctttccaatccattcgattccattcgattcaattccatttgattctctttcattctattttattccatgccatttgattgcattgcattccattccgtttgattccagtccatccaagaaagttccattccagtccattgctttccagtccattccattccactctagtctattccactccattcccttccattgcattccatactattccattccattcctttgcattccgtttccaatctattcgagtccattgcattccagtccaatccattcgattacattccttttgattccctgccagtcgattgcattgcatactacaccattccaaaggagttcattccattctatctccacactttccattccactctgtttgagtccattccattccagtccatttaattcaagggcattccattccattccattccattccatttcatattattccattccattcaattccattccagatgattccattccattctataccattgctctctgttccattccattccatctgtctccattcctttcgtttcgattcctttccattccattccattacatttgatcctattttattaaattgcattctattcgagtgatttccattcgagtcctttccattcgattccattccattctattccattcctttggattccattccattccgttccgttcacatcaattcctggcgattccattacattcgatttcttgccattcgattccattccttttgactccatttcattcgattccattccattccattaatttccattccattcgagacctttccattgcagtcttttcccttcgagtccattccgttcgattccattccgttcgattcccttccattcgattccattccattggagtccgtaccagtcgagtccattctattccagtccattagtttcgactccattgcattcgagtgcattccattccgtggctgtccattccattccgtttgatgccattccatacgattccattcaattcgagaccattctattcctgtccattccttgtggttcgattccatttcactctagtccattccattccattcaattccattcgactctattccgttccaatcaattccattccattcgattccatttttttcgagaaccttccattacactcccttccattccagtgcattccattccagtctcttcacttcgattccattccattcgtttcgattcctttccattccagcccattccattccattccattcctttcctttccgtttcattagattccattgcattccattccattcaattcaattccgtgctattcaatttgattcatttccatttaattccattccattagattccattccgtacgattccattccttttgaatccattccattggagtccattcacttccagaacattccattccagtcgaatccattcgagtacattccattaaagttcattacattctaatacattccattccattgcattccattccattccattcgatgccattcgattccattccaagccaaatcattgcattcctttccattccgttcctatcaattccattccattcgatttagttcgattctattcacttccattccattcgattccattccattggagtcaattcctttcgacacccagcctttccagtcaatgattttggattccatttttttgcattccattacattctatgacattcgattccgtttcattgcattccattccatacatttttattccattcgagaccgtagcattccactttattccaggcctgtccattacactacattcccttccattccaatgaattccattccattccaatccattcctttcctttcgcttgcattccattctattctcttctactgcatacaatttcactccattcgttcccattccattcaattccattccattcaattccattccatttgtttccattctcttcgattccatttctttatattccatgccattcgattccattctattgggttgcattacattcgtgttcattccattccagaccattccatttgactccattcctttcgagccctttcaatttgagtccattcctttccagtccatttcactccagtccattactatccattccataccattccatcccattccattccattccattccattccattccattccattgcactgcactccattccattacattctactctatctgagtcgattttattgcattagattctattccatt

SEQ ID NO: 45050 - DNA, 2300 bp, Homo sapien
atggaatcgaatgaaatggagtcaaaaggaatggaatcgaatggcaagaaatcgaatgtaatggaatcgccaggaattgatgtgaacggaacggaatggaatggaatccaaaggaatggaatagaatggaatggaatcgaatggaaaggactcgaatggaaatcactcgaatagaatgcaatttaataaaataggatcaaatgtaatggaatggaatggaaaggaatcgaaacgaaaggaatggagacagatggaatggaatggaacagagagcaatggtatagaatggaatggaatcatctggaatggaattgaatggaatggaataatatgaaatggaatggaatggaatggaatggaatgcccttgaattaaatggactggaatggaatggactcaaacagagtggaatggaaagtgtggagatagaatggaatgaactcctttggaatggtgtagtatgcaatgcaatcgactggcagggaatcaaaaggaatgtaatcgaatggattggactggaatgcaatggactcgaatagattggaaacggaatgcaaaggaatggaatggaatagtatggaatgcaatggaagggaatggagtggaatagactagagtggaatggaatggactggaaagcaatggactggaatggaactttcttggatggactggaatcaaacggaatggaatgcagtgcaatcaaatggcatggaataaaatagaatgaaagagaatcaaatggaattgaatcgaatggaatcgaatggattggaaaggaatagaatggaatggaatggaattgactcaaatggaatggactagaatggaatggattcgaatggaaggcaaaggaatggaatctattggaatggactgtaatggaatggaatggaagggattggaatggactcgaatggaatggactgcaatagaaaggattcgaatggaatgaaaaagaattgaatggaatagaacagaatggaatcaaatcgaatgaaatggaatggaatagaaaggaatggaatgaaatggaatggaaaggattcgaatggaatgcaatcgaatggaatggaatcgaacggaatggaataaaatggaagaaaactggcaagaaatggaatcgaaatgaatggagtgttatggaacggactcaaaaggaattgaatgtaatagaatggagtggagtggactcgaatataatggactggaatggaatgaaatcacatggaatgggaacgaatggaatggaatggaaaggaatggaatcgaatggaaaggaatcgaatggaagggaatgaaattgaatcaacaggaatggaagggaatagaatagacggtaatggaatggactcgaatagaatggacacgaatgctcaaattaaatggactcgaatggaatggaaacgaaaggaatgtcatcgaatggaattgaatcgattggaatgaaatcgcatagaatggagtggaatcaaatggaattgaatcgaaaggaaaggaagcgaatggactgaaatgaaatggaatggaattgaatggaaagtaatgcaatggaatagaatggaacgaaatttcacggaatggaatcaaactgaatggaatcaaatcaatggaatcaaatcaaatggaatggaaaggaattgaatggagtagatgggattggatgggattggaatgaaatgtactggaaaggactcgaatttcatgaaacggaatggaatgaattggaacggaattgactcgaatggaatggaatgtcatgggatggcatcaaatggaatgacatcaaatggaatggaatcgaatgcaatggaatgctatggaatggaatggaatgcattggaatggaatgtccgctaatggaatggattcgagtggaatggaattgaatataatggagtcgaatgaaatcgaattgaaaggaatgggatcgaatacaatggaatatactggaatgtaacgtaatgaactggaatgtaattgactggaatggaatgtacatgaatggaatgtaatcgaatggaaagtaatccaatggaatagaatctaatgcaataaaatcgactcagatagagtagaatgtaatggaatggagtgcagtgcaatggaatggaatggaatggaatggaatggaatggaatgggatggaatggtatggaatggatagtaatggactggagtgaaatggactggaaaggaatggactcaaattgaaagggctcgaaaggaatggagtcaaatggaatggtctggaatggaatgaacacgaatgtaatgcaacccaatagaatggaatcgaa

SEQ ID NO: 45051 - DNA, 2300 bp, Homo sapien
cccattccattccattccattccattccattccattccattgcactgcactccattccattacattctactctatctgagtcgattttattgcattagattctattccattggattactttccattcgattacattccattcatgtacattccattccagtcaattacattccagttcattacgttacattccagtatattccattgtattcgatcccattcctttcaattcgatttcattcgactccattatattcaattccattccactcgaatccattccattagcggacattccattccaatgcattccattccattccatagcattccattgcattcgattccattccatttgatgtcattccatttgatgccatcccatgacattccattccattcgagtcaattccgttccaattcattccattccgtttcatgaaattcgagtcctttccagtacatttcattccaatcccatccaatcccatctactccattcaattcctttccattccatttgatttgattccattgatttgattccattcagtttgattccattccgtgaaatttcgttccattctattccattgcattactttccattcaattccattccatttcatttcagtccattcgcttcctttcctttcgattcaattccatttgattccactccattctatgcgatttcattccaatcgattcaattccattcgatgacattcctttcgtttccattccattcgagtccatttaatttgagcattcgtgtccattctattcgagtccattccattaccgtctattctattcccttccattcctgttgattcaatttcattcccttccattcgattcctttccattcgattccattcctttccattccattccattcgttcccattccatgtgatttcattccattccagtccattatattcgagtccactccactccattctattacattcaattccttttgagtccgttccataacactccattcatttcgattccatttcttgccagttttcttccattttattccattccgttcgattccattccattcgattgcattccattcgaatcctttccattccatttcattccattcctttctattccattccatttcattcgatttgattccattctgttctattccattcaattctttttcattccattcgaatcctttctattgcagtccattccattcgagtccattccaatcccttccattccattccattacagtccattccaatagattccattcctttgccttccattcgaatccattccattctagtccattccatttgagtcaattccattccattccattctattcctttccaatccattcgattccattcgattcaattccatttgattctctttcattctattttattccatgccatttgattgcactgcattccattccgtttgattccagtccatccaagaaagttccattccagtccattgctttccagtccattccattccactctagtctattccactccattcccttccattgcattccatactattccattccattcctttgcattccgtttccaatctattcgagtccattgcattccagtccaatccattcgattacattccttttgattccctgccagtcgattgcattgcatactacaccattccaaaggagttcattccattctatctccacactttccattccactctgtttgagtccattccattccagtccatttaattcaagggcattccattccattccattccattccatttcatattattccattccattcaattccattccagatgattccattccattctataccattgctctctgttccattccattccatctgtctccattcctttcgtttcgattcctttccattccattccattacatttgatcctattttattaaattgcattctattcgagtgatttccattcgagtcctttccattcgattccattccattctattccattcctttggattccattccattccgttccgttcacatcaattcctggcgattccattacattcgatttcttgccattcgattccattccttttgactccatttcattcgattccattccattccattaatttccattccattcgagacctttccattgcagtcttttcccttcgagtccattccgttcgattcccttccattcgattccattccattggggtccgtaccagtcgagtccattctattccagtccattagtttcgactccatt

SEQ ID NO: 45052 - DNA, 2300 bp, Homo sapien
aaggaaaggaatggattggaatggaatggaattcattggaatggaagggaatgtagtgtaatggacaggcctggaataaagtggaatgctacggtctcgaatggaataaaaatgtatggaatggaatgcaatgaaacggaatcgaatgtcatagaatgtaatggaatgcaaaaaaatggaatccaaaatcattgactggaaaggctgggtgtcgaaaggaattgactccaatggaatggaatcgaatggaatggaagtgaatagaatcgaactaaatcgaatggaatggaattgataggaacggaatggaaaggaatgcaatgatttggtatggaatggaatcgaatggcatcgaatggaatggaatggaatgcaatggaatggaatgtattagaatgtaatgaactttaatggaatgtactcgaatggattcgactggaatggaatgttctggaagtgaatggactccaatggaatggattcaaaaggaatggaatcgtacggaatggaatctaatggaatgcaattaaatggaaatgaatcaaattgaatagcacggaattgaattgaatggaatggaatgcaatggaatctaatgaaacggaaaggaaaggaatggaatggaatggaatgggctggaatggaaaggaatcgaaacgaatggaatggaatcgaactgaagagactggaatggaatgcactggaatggaagggagtgtaatggaaggttgtcgaaaaaaatggaatcgaatggaatggaattgaatggaacggaatagagtcgaatggaattgaatggaatggaatggactagagtgaaatggaatcgaaccacaaggaatggacaggaatagaatggtctcgaattgaatggaatcgtatggaatggcatcaaacggaatggaatggacagccacggaatggaatgcactcgaatgcaatggagtcgaaactaatggactggaatagaatggactcgactggtacggaccccaatggaatggaatcgaatggaagggaatcgaacggaatggactcgaagggaaaagactgcaatggaaaggtctcgaatggaatggaaattaatggaatggaatggaatcgaatgaaatggagtcaaaaggaatggaatcgaatggcaagaaatcgaatgtaatggaatcgccaggaattgatgtgaacggaacggaatggaatggaatccaaaggaatggaatagaatggaatggaatcgaatggaaaggactcgaatggaaatcactcgaatagaatgcaatttaataaaataggatcaaatgtaatggaatggaatggaaaggaatcgaaacgaaaggaatggagacagatggaatggaatggaacagagagcaatggtatagaatggaatggaatcatctggaatggaattgaatggaatggaataatatgaaatggaatggaatggaatggaatggaatgcccttgaattaaatggactggaatggaatggactcaaacagagtggaatggaaagtgtggagatagaatggaatgaactcctttggaatggtgtagtatgcaatgcaatcgactggcagggaatcaaaaggaatgtaatcgaatggattggactggaatgcaatggactcgaatagattggaaacggaatgcaaaggaatggaatggaatagtatggaatgcaatggaagggaatggagtggaatagactagagtggaatggaatggactggaaagcaatggactggaatggaactttcttggatggactggaatcaaacggaatggaatgcagtgcaatcaaatggcatggaataaaatagaatgaaagagaatcaaatggaattgaatcgaatggaatcgaatggattggaaaggaatagaatggaatggaatggaattgactcaaatggaatggactagaatggaatggattcgaatggaaggcaaaggaatggaatctattggaatggactgtaatggaatggaatggaagggattggaatggactcgaatggaatggactgcaatagaaaggattcgaatggaatgaaaaagaattgaatggaatagaacagaatggaatcaaatcgaatgaaatggaatggaatagaaaggaatggaatgaaatggaatggaaaggattcgaatggaatgcaatcgaatggaatggaatcgaacggaatggaataaaatggaagaaaactggcaagaaatggaatcgaaatgaatggagtgttatggaacggactcaaaaggaattgaatgtaatagaatggagtggagtggactcgaatataatg

SEQ ID NO: 45053 - DNA, 2300 bp, Homo sapien
cattccattccattctattcctttccaatccattcgattccattcgattcaattccatttgattctctttcattctattttattccatgccatttgattgcactgcattccattccgtttgattccagtccatccaagaaagttccattccagtccattgctttccagtccattccattccactctagtctattccactccattcccttccattgcattccatactattccattccattcctttgcattccgtttccaatctattcgagtccattgcattccagtccaatccattcgattacattccttttgattccctgccagtcgattgcattgcatactacaccattccaaaggagttcattccattctatctccacactttccattccactctgtttgagtccattccattccagtccatttaattcaagggcattccattccattccattccattccatttcatattattccattccattcaattccattccagatgattccattccattctataccattgctctctgttccattccattccatctgtctccattcctttcgtttcgattcctttccattccattccattacatttgatcctattttattaaattgcattctattcgagtgatttccattcgagtcctttccattcgattccattccattctattccattcctttggattccattccattccgttccgttcacatcaattcctggcgattccattacattcgatttcttgccattcgattccattccttttgactccatttcattcgattccattccattccattaatttccattccattcgagacctttccattgcagtcttttcccttcgagtccattccgttcgattcccttccattcgattccattccattggggtccgtaccagtcgagtccattctattccagtccattagtttcgactccattgcattcgagtgcattccattccgtggctgtccattccattccgtttgatgccattccatacgattccattcaattcgagaccattctattcctgtccattccttgtggttcgattccatttcactctagtccattccattccattcaattccattcgactctattccgttccattcaattccattccattcgattccatttttttcgacaaccttccattacactcccttccattccagtgcattccattccagtctcttcagttcgattccattccattcgtttcgattcctttccattccagcccattccattccattccattcctttcctttccgtttcattagattccattgcattccattccattcaattcaattccgtgctattcaatttgattcatttccatttaattgcattccattagattccattccgtacgattccattccttttgaatccattccattggagtccattcacttccagaacattccattccagtcgaatccattcgagtacattccattaaagttcattacattctaatacattccattccattgcattccattccattccattcgatgccattcgattccattccataccaaatcattgcattcctttccattccgttcctatcaattccattccattcgatttagttcgattctattcacttccattccattcgattccattccattggagtcaattcctttcgacacccagcctttccagtcaatgattttggattccatttttttgcattccattacattctatgacattcgattccgtttcattgcattccattccatacatttttattccattcgagaccgtagcattccactttattccaggcctgtccattacactacattcccttccattccaatgaattccattccattccaatccattcctttcctttcgcttgcattccattctattctcttctaccgcatacaatttcactccattcgttcccattccattcaattccattccattcaattccattccatttgtttccattctcttcgattccatttctttatattccatgccattcgattccattctattgggttgcattacattcgtgttcattccattccagaccattccatttgactccattcctttcgagccctttcaatttgagtccattcctttccagtccatttcactccagtccattactatccattccataccattccatcccattccattccattccattccattccattccattccattccattgcattccattccattccattccattgcactgcactccattccattacattctactctatcttagt

SEQ ID NO: 45054 - DNA, 2300 bp, Homo sapien
ccctttcaatttgagtccattcctttccagtccatttcactccagtccattactatccattccataccattccatcccattccattccattccattccattccattccattccattccattgcattccattccattccattccattgcactgcactccattccattacattctactctatcttagtcgattttattgcattagattctattccattggattactttccattcggttacattccattcatgtacattccattccagtcaattacattcgagttcattacgttacattccagtatattccattgtattcgatcccattcctttcaattccatttcattcgactccattatattcaattccattccactcgaatccattccattagaggacattccattccaatgcattccattccattccatagcattccattgcattcgattccattccatttgatgccattccatttgatgccatcccatgacattccattccattcgagtccattccgttccaattcattccattccgtttcatgaaattcgagtcctttccagtacatttcattccaatcccatccaatcccatctactccattcaattcctttccattccatttgatttgattccattgatttgattccattcagtttgattccattccgtgaaatttcgttccattctattccattgcattactttccattcaattccattccatttcatttcagtccattcgcttcctttcctttcgattcaattccatttgattccactccattctatgcgatttcattccaattgattcaattccattcgatgacattcctttcgtttccattccattcgagtccatttaatttgagcattcgtgtccattctattcgagtccattccattacagtctattctattcccttccattcgtgttgattcaatttcattcccttccattcgattcctttccattcgattccattcctttccattccattccattcgttcccattccatgtgatttcattccattccagtccattatattcgagtccactccactccattctattacattcaattccttttgagtccgttccataacactccattcatttcgattccatttcttgccagttttcttccattttattccattccgttcgattccattccattcgattgcattccattcgaatcctttctattgcagtccattccattcgagtccattccaatcccttccattccattccattacagtccattccaatagattccattcctttgccttccattcgaatccattccattctagtccattccatttgagtcaattccattccattccattctattcctttccaatccattcgattccattcgattcaattccatttgattctctttcattctaatttattccatgccatttgattgcattgcattccattccgtttgattccagtccatccaagaaagttccattccagtccattgctttccagtccattccattccactctagtctattccactccattcccttccattgcattccatactattccattccattcctttgcattccgtttccaatctattcgagtccattgcattccagtccaatccattcgattacattccttttgattccctgccagtcgattgcattgcatactacaccattccaaaggagttcattccattctatctccacactttccattccactctgtttgagtccattccattccagtccatttaattcaagggcattccattccattccattccattccatttcatattattccattccattcaattccattccagatgattccattccattctataccattgctctctgttccattccattccatctgtctccattcctttcgtttcgattcctttccattccattccattacatttgatcctattttatcaaattgcattctattcgagtgatttccattcgagtcctttccattcgattccattccattctattccattcctttggatcccattccattccgttccgttcacatcaattcctggcgattccattacattcgatttcttgccattcgattccattccttttgactccatttcattcgattccattccattccattaatttccattccattcgagacctttccattgcagtcttttcccttcgagtccattccgttcgattcccttccgttcgattcccttccattcgattccattccattggagtccgtaccagtcgagtccattctattccagtccatt

SEQ ID NO: 45055 - DNA, 2300 bp, Homo sapien
tattcctttccaatccattcgattccattcgattcaattccatttgattctctttcattctaatttattccatgccatttgattgcattgcattccattccgtttgattccagtccatccaagaaagttccattccagtccattgctttccagtccattccattccactctagtctattccactccattcccttccattgcattccatactattccattccattcctttgcattccgtttccaatctattcgagtccattgcattccagtccaatccattcgattacattccttttgattccctgccagtcgattgcattgcatactacaccattccaaaggagttcattccattctatctccacactttccattccactctgtttgagtccattccattccagtccatttaattcaagggcattccattccattccattccattccatttcatattattccattccattcaattccattccagatgattccattccattctataccattgctctctgttccattccattccatctgtctccattcctttcgtttcgattcctttccattccattccattacatttgatcctattttatcaaattgcattctattcgagtgatttccattcgagtcctttccattcgattccattccattctattccattcctttggatcccattccattccgttccgttcacatcaattcctggcgattccattacattcgatttcttgccattcgattccattccttttgactccatttcattcgattccattccattccattaatttccattccattcgagacctttccattgcagtcttttcccttcgagtccattccgttcgattcccttccgttcgattcccttccattcgattccattccattggagtccgtaccagtcgagtccattctattccagtccattagtttcgactccattgcattcgagtgcattccattccgtggctgtccattccattccgtttgatgccattccatacgattccattcaattcgagaccattctattcctgtccattccttgtggttcgattccatttcactctagtccattccattccattcaattccattcgactctattacgttccattcaattccattccattcgattccatttttttcgagaaccttgcattacactcccttccattccagtgcattccattccagtctcttcacttcgattccattccattcgtttcgattcctttccattccagcccattccattccattccattcctttcctttccgtttcattagattccattgcattccattccattcaattcaattccgtgctattcaatttgattcatttccatttaattccattccattagattccattccgtacgattccattccttttgaatccattccattggagtccattcacttccagaacattccattccagtcgaatccattcgagtacattccattaaagttcattacattctaatacattccattccattgcattccattccattccattcgatgccattcgattccattccatgccaaatcattgcattcctttccattccgttcctatcaattccattccattcgatttagttcgattctattcacttccattccattcgattccattccattggagtcaattcctttcgacacccagcctttccagtcaatgattttggattccatttttttgcattccattacattctatgacattcgattccgtttcattgcattccattccatacatttttattccattcgagaccgtagcattccactttattccaggcctgtccattacactacattcccttccattccaatgaattccattccattccaatccattcctttcctttcgcttgcattccattctattctcttctactgcatacaatttcactccattcgttcccattccattcaattccattccattcaattccattccctttgtttccattctcttcgattccatttctttatattccatgccattcgattccattctattgggttgcattacattcgagttcattccattccagaccattccatttgactccattcctttcgagccctttcaatttgagtccattcctttccagtccatttcactccagtccattactatccattccataccattccatcccattccattccattccattccattccattccattccattccattgcattccattccattccattccattgcactgcactccattccattacattctactctatctgagt

SEQ ID NO: 45056 - DNA, 2300 bp, Homo sapien
tggaatggaatggaattcattggaatggaagggaatgtagtgtaatggacaggcctggaataaagtggaatgctacggtctcgaatggaataaaaatgtatggaatggaatgcaatgaaacggaatcgaatgtcatagaatgtaatggaatgcaaaaaaatggaatccaaaatcattgactggaaaggctgggtgtcgaaaggaattgactccaatggaatggaatcgaatggaaatggaagtgaatagaatcgaactaaatcgaatggaatggaattgataggaacggcatcgaaaggaatgcaatgatttggcatggaatggaatcgaatggcatcgaatggaatggaatggaatgcaatggaatggaatgtattagaatgtaatgaactttaatggaatgtactcgaatggattcgactggaatggaatgttctggaagtgaatggactccaatggaatggattcaaaaggaatggaatcgtacggaatggaatctaatggaatggaattaaatggaaatgaatcaaattgaatagcacggaattgaattgaatggaatggaatgcaatggaatctaatgaaacggaaaggaaaggaatggaatggaatggaatgggctggaatggaaaggaatcgaaacgaatggaatggaatcgaagtgaagagactggaatggaatgcactggaatggaagggagtgtaatggaaggttctcgaaaaaaatggaatcgaatggaatggaattgaatggaacggaatagagtcgaatggaattgaatggaatggaatggactagagtgaaatggaatcgaaccacaaggaatggacaggaatagaatggtctcgaattgaatggaatcgtatggaatggcatcaaacggaatggaatggacagccacggaatggaatgcactcgaaagcaatggagtcgaaactaatggactggaatagaatggactcgactggtacggactccaatggaatggaatcgaatggaagggaatcgaacggaagggaatcgaacggaatggactcgaagggaaaagactgcaatggaaaggtctcgaatggaatggaaattaatggaatggaatggaatcgaatgaaatggagtcaaaaggaatggaatcgaatggcaagaaatcgaatgtaatggaatcgccaggaattgatgtgaatggaacggaatggaatggaatccaaaggaatggaatagaatggaatggaatcgaatggaaaggactcgaatggaaatcactcgaatagaatgcaatttaataaaataggatcaaatgtaatggaatggaatggaaaggaatcgaaacgaaaggaatggagacagatggaatggaatggaacagagagcaatggtatagaatggaatggaatcatctggaatggaattgaatggaatggaataatatgaaatggaatggaatggaatggaatggaatgcccttgaattgaatggactggaatagaatggactcaaacagagtggaatggaaagtgtggagatagaatggaatgaactcctttggaatggtgtagtatgcaatgcaatcgactggcagggaatcaaaaggtacgtaatcgaaaggattggactggaatgcaaaggactcgaatagattggaaacggaatgcaaaggaatggaatggaatagtatggaatgcaatggaagggaatggagtggaatagactagagtggaatggaatggactggaaagcaatggactggaatggaactttcttggatggactggaatcaaacggaatggaatgcagtgcaatcaaatggcatggaataaaatagaatgaaagagaatcaaatggaattgaatcgaatggaatcgaatggattggaaaggaatagaatggaatggaatggaattgactcaaatggaatggactagaatggaatggattcgaatggaaggcaaaggaatggaatctattggaatggactgtaatggaatggaatggaagggattggaatggactcgaatggaatggactgcaatagaaaggattcgaatggaatgaaaaagaattgaatggaatagaacagaatggaatgaaatcgaatgaaatggaatggaatagaaaggaatggaatgaaatggaatggaaaggattcgaatggaatgcaatcgaatggaatggaatcgaacggaatggaataaaatggaagaaaactggcaagaaatggaatcgaaatgaatggagtgttatggaacggactcaaaaggaattgaatgtaatagaatggagtggagtggactcgaatataatg

SEQ ID NO: 45057 - DNA, 2300 bp, Homo sapien
tccattccattccattgcattccattccattccattccattgcactgcactccattccattacattctactctatctgagtcgattttattgcattagattctattccattggattactttccattcgattacattccattcatgtacattccattccagtcaattacattcgagttcattacgttacattccagtatattccattgtattcgatcccattcctttcaattccatttcattcgactccattatattcaattccattccactcgaatccattccattagcggacattccattccaatgcattccattccattccatagcattccattgcattcgattccattccatttgatgtcattccatttgatgccatcccatgacattccattccattcgagtccattccgttccaattcattccattccgtttcatgaaattcgagtcctttccagtacatttcattccaatcccatccaatcccatctactccattcaattcctttccattccatttgatttgattccattgatttgattccattcagtttgattccattccgtgaaatttcgttccattctattccattgcattactttccattcaattccattccatttcatttcagtccattcgcttcctttcctttcgattcaattccatttgattccactccattctatgcgatttcattccaatcgattcaattccattcgatgacattcctttcgtttccaatccattcgagtccatttaatttgagcattcgtgtccattctattcgagtccattccattacagtctattctattcccttccattcgtgttgattcaatttcattcccttccattcgattcctttccattcgattccattcctttccattccattccattcgttcccattccatgtgatttcattccattccagtccattatattcgagtccactccactccattctattacattcaattccttttgagtccgttccataacactccattcatttcgattccatttcttgccagttttcttccattttcttccattccgttcgattccattccattcgattgcattccattcgaatcctttccattccatttcattccattcctttctattccattccatttcattcgatttgattccattctgttctattccattcaattctttttcattccattcgaatcctttctattgcagtccattccattcgagtccattccaatcccttccattccattccattacagaccattccaatagattccattcctttgccttccattcgaatccattccattctagtccattccatttgagtccattccattccattccattctattcctttccaatccattcgattccattcgattcaattccatttgattctctttcattctattttattccatgccatttgattgcattgcattccattccgtttgattccagtccatccaagaaagttccattccagtccagtgctttccagtccattccattccactctagtctattccactccattcccttccattgcattccatactattccattccattcctttgcattccgtttacaatctattcgagtccattgcattccagtccaatccattcgattacattccttttgattccctgccagtcgattgcattgcatactacaccattccaaaggagttcattccattctatctccacactttccattccactctgtttgagtccattccattccagtccatttaattcaagggcattccattccattccattccattccatttcatattattccattccattcaattccattccagatgattccattccattctataccattgctctctgttccattccattccatctgtctccattcctttcgtttcgattcctttccattccattccattacatttgatcctattttattaaattgcattctattcgagtgatttccattcgagtcctttccattcgattccattccattctattccattcctttggattccattccattccgttccgttcacatcaattcctggcgattccattacattcgatttcttgccattcgattccattccttttgactccatttcattcgattccattccattccattaatttccattccattcgagacctttccattgcagtcttttcccttcgagtccattccgttcgattcccttccgttcgattcccttccattcgattccattccattggagtccgtaccagtcgagtccattctattccagtccatt

SEQ ID NO: 45058 - DNA, 2300 bp, Homo sapien
gaatggaatcgaatggcaagaaatcgaatgtaatggaatcgccaggaattgatgtgaacggaacggaatggaatggaatccaaaggaatggaatagaatggaatggaatcgaatggaaaggactcgaatggaaatcactcgaatagaatgcaatttaataaaataggatcaaatgtaatggaatggaatggaaaggaatcgaaacgaaaggaatggagacagatggaatggaatggaacagagagcaatggtatagaacggaatggaatcatctggaatggaattgaatggaatggaataatatgaaatggaatggaatggaatggaatggaatgcccttgaattaaatggactggaatggaatggactcaaacagagtggaatggaaagtgtggagatagaatggaatgaactcctttggaatggtgtagtatgcaatgcaatcgactggcagggaatcaaaaggaatgtaatcgaatggattggactggaatgcaatggactcgaatagattggaaacggaatgcaaaggaatggaatggaatagtatggaatgcaatggaagggaatggagtggaatagactagagtggaatggaatggactggaaagcaatggactggaatggaactttcttggatggactggaatcaaacggaatggaatgcaatgcaatcaaatggcatggaataaattagaatgaaagagaatcaaatggaattgaatcgaatggaatcgaatggattggaaaggaatagaatggaatggaatggaattgactcaaatggaatggactagaatggaatggattcgaatggaaggcaaaggaatggaatctattggaatggactgtaatggaatggaatggaagggattggaatggactcgaatggaatggactgcaatagaaaggattcgaatggaatgaaaaagaattgaatggaatagaacagaatggaatcaaatcgaatgaaatggaatggaatagaaaggaatggaatgaaatggaatggaaaggattcgaatggaatgcaatcgaatggaatggaatcgaacggaatggaataaaatggaagaaaactggcaagaaatggaatcgaaatgaatggagtgttatggaacggactcaaaaggaattgaatgtaatagaatggagtggagtggactcgaatataatggactggaatggaatgaaatcacatggaatgggaacgaatggaatggaatggaaaggaatggaatcgaatggaaaggaatcgaatggaagggaatgaaattgaatcaacacgaatggaagggaatagaatagactgtaatggaatggactcgaatagaatggacacgaatgctcaaattaaatggactcgaatggaatggaaacgaaaggaatgtcatcgaatggaattgaatcaattggaatgaaatcgcatagaatggagtggaatcaaatggaattgaatcgaaaggaaaggaagcgaatggactgaaatgaaatggaatggaattgaatggaaagtaatgcaatggaatagaatggaacgaaatttcacggaatggaatcaaactgaatggaatcaaatcaatggaatcaaatcaaatggaatggaaaggaattgaatggagtagatgggattggatgggattggaatgaaatgtactggaaaggactcgaatttgatgaaacggaatggaatgaattggaacggaatggactcgaatggaatggaatgtcatgggatggcatcaaatggaatggcatcaaatggaatggaatcgaatgcaatggaatgctatggaatggaatggaatgcattggaatggaatgtcctctaatggaatggattcgagtggaatggaattgaatataatggagtcgaatgaaatggaattgaaaggaatgggatcgaatacaatggaatatactggaatgtaacgtaatgaactcgaatgtaattgactggaatggaatgtacatgaatggaatgtaatcgaatggaaagtaatccaatggaatagattctaatgcaataaaatcgactcagatagagtagaatgtaatggaatggagtgcagtgcaatggaatggaatggaatggaatgcaatggaatggaatggaatggaatggaatggaatggaatggaatgggatggaatggtatggaatggatagtaatggactggagtgaaatggactggaaaggaatggactcaaattgaaagggctcgaaaggaatggagtcaaatggaatggtctggaatggaatgaacacgaatgtaatgcaacccaatagaatggaatcg

SEQ ID NO: 45059 - DNA, 2300 bp, Homo sapien
tccattccattccattgcattccattccattccattccattgcactgcactccattccattacattctactctatctgagtcgattttattgcattagaatctattccattggattactttccattcgattacattccattcatgtacattccattccagtcaattacattcgagttcattacgttacattccagtatattccattgtattcgatcccattcctttcaattccatttcattcgactccattatattcaattccattccactcgaatccattccattagaggacattccattccaatgcattccattccattccatagcattccattgcattcgattccattccatttgatgccattccatttgatgccatcccatgacattccattccattcgagtccattccgttccaattcattccattccgtttcatcaaattcgagtcctttccagtacatttcattccaatcccatccaatcccatctactccattcaattcctttccattccatttgatttgattccattgatttgattccattcagtttgattccattccgtgaaatttcgttccattctattccattgcattactttccattcaattccattccatttcatttcagtccattcgcttcctttcctttcgattcaattccatttgattccactccattctatgcgatttcattccaattgattcaattccattcgatgacattcctttcgtttccattccattcgagtccatttaatttgagcattcgtgtccattctattcgagtccattccattacagtctattctattcccttccattcgtgttgattcaatttcattcccttccattcgattcctttccattcgattccattcctttccattccattccattcgttcccattccatgtgatttcattccattccagtccattatattcgagtccactccactccattctattacattcaattccttttgagtccgttccataacactccattcatttcgattccatttcttgccagttttcttccattttattccattccgttcgattccattccattcgattgcattccattcgaatcctttccattccatttcattccattcctttctattccattccatttcattcgatttgattccattctgttctattccattcaattctttttcattccattcgaatcctttctattgcagtccattccattcgagtccattccaatcccttccattccattccattacagtccattccaatagattccattcctttgccttccattcgaatccattccattctagtccattccatttgagtcaattccattccattccattctattcctttccaatccattcgattccattcgattcaattccatttgattctctttcattctaatttattccatgccatttgattgcattgcattccattccgtttgattccagtccatccaagaaagttccattccagtccattgctttccagtccattccattccactctagtctattccactccattcccttccattgcattccatactattccattccattcctttgcattccgtttccaatctattcgagtccattgcattccagtccaatccattcgattacattccttttgattccctgccagtcgattgcattgcatactacaccattccaaaggagttcattccattctatctccacactttccattccactctgtttgagtccattccattccagtccatttaattcaagggcattccattccattccattccattccatttcatattattccattccattcaattccattccagatgattccattccgttctataccattgctctctgttccattccattccatctgtctccattcctttcgtttcgattcctttccattccattccattacatttgatcctattttattaaattgcattctattcgagtgatttccattcgagtcctttccattcgattccattccattctattccattcctttggattccattccattccgttccgttcacatcaattcctggcgattccattacattcgatttcttgccattcgattccattccttttgactccatttcattcgattccattccattccattaatttccattccattcgagacctttccattgcagtcttttcccttcgagtccattccgttcgattcccttccattcgattccattccattggagtccgtaccagtcgagtccattctattccagtccattagtttcgactccatt

SEQ ID NO: 45060 - DNA, 2300 bp, Homo sapien
gtgttatggaacggactcaaaaggaattgaatgtaatagaatggagtggagtggactcgaatataatggactggaatggaatgaaatcacatggaatgggaacgaatggaatggaatggaaaggaatggaatcgaatggaaaggaatcgaatggaagggaatgaaattgaatcaacacgaatggaagggaatagaatagactgtaatggaatggactcgaatagaatggacacgaatgctcaaattgaatggactcgaatggaatggaaacgaaaggaatgtcaccgaatggaattgaatcgattggaatgaaatcgcatagaatggagtggaatcaaatggaattgaatcgaaaggaaaggaagcgaatggactgaaatgaaatggaatggaattgaatggaaaataatgcaatggaatagaatggaacgaaatttcacggaatggaatcaaactgaatggaatcaaatcaatggaatcaaatcaaatggaatggaaaggaattgaatggagtagatgggattggatgggattggaatgaaatgtactggaaaggactcgaatttcatgaaacggaatggaatgaattggaacggaatggactcgaatggaatggaatgtcatgggatggcatcaaatggaatgacatcaaatggaatggaatcgaatgcaatggaatgctatggaatggaatggaatgcattggaatggaatgtccgctaatggaatggattcgagtggaatgtaattgaatataatggagtcgaatgaaatggaattgaaaggaatgggatcgaatacaatggaatatactggaatgtaacgtaatgaactggaatgtaattgactggaatggaatgtacatgaatggaatgtaatcgaatggaaagtaatccaatggaatagaatctaatgcaataaaatcgactcagatagagtagaatgtaatggaatggagtgcagtgcaatggaatggaatggaatggaatgcaatggaatggaatggaatggaatggaatggaatggaatggaatgggttggaatggtatggaatggatagtaatggactggagtgaaatggactggaaaggaatggactcaaattgaaagggctcgaaaggaatggagtcaaatggaatggtctggaatggaatgaacacgaatgtaatgcaacccaatagaatggaatcgaatggcatggaatataaagaaatggaatcgaagagaatggaaacaaatggaatggaattgaatggaatggaattgaatggaatgggaacgaatggagtgaaattgtatgcagtagaagagaatagaatggaatgcaagcgaaaggaaaggaatggattggaatggaatggaattcattggaatggaagggaatgtagtgtaatggacaggcctggaataaagtggaatgctacggtctcgaatggaataaaaatgtatggaatggaatgcaatgaaacggaatcgaatgtcatagaatgtaatggaatgcaaaaaaatggaatccaaaatcattgactggaaaggctgggtgtcgaaaggaattgactccaatggaatggaatcgaatggaatggaagtgaatagaatcgaactaaatcgaatggaatggaattgataggaacggaatggaaaggaatgcaatgatttggcatggaatggaatcgaatggcatcgaatggaatggaatgtattagaatgtaatgaactttaatggaatgtactcgaatggattcgactggaatggaatgttctggaagtgaatggactccaatggaatggattcaaaaggaatggaatcgtacggaatggaatctaatggaatggaattaaatggaaatgaatcaaattgaatagcacggaattgaattgaatggaatggaatgcaatggaatctaatgaaacggaaaggaaaggaatggaatggaatggaatgggctggaatggaaaggaatcgaaacgaatggaatggaatcgaagtgaagagactggaatggaatgcactggaatggaagggagtgtaatggaaggttctcgaaaaaaatggaatcgaatggaatggaattgaatggaacggaatagagtcgaatggaattgaatggaatggaatggactagagtgaaatggaatcgaaccacaaggaatggacaggaatagaatggtctcgaattgaatggaatcgtatggaatggcatcaaacggaatggaatggacagccacggaatggaatgcactcgaatgcaatggagtcgaaactaatggactggaatagaatggactcgactggtacg

SEQ ID NO: 45061 - DNA, 2300 bp, Homo sapien
tattcctttccaatccatttgattccattcgattcaattccatttgattctctttcattctattttattccatgccatttgattgcattgcattccattccgtttgattccagtccatccaagaaagttccattccagtccattgctttccagtccattccattccactctagtctattccactccattcccttccattgcattccatactattccattccattcctttgcattccgtttccaatctaatcgagtccattacattccagtccaatccattcgattacattccttttgattccctgccagtcgattgcattgcatactacaccattccaaaggagttcattccattctatctccacactttccattccactctgtttgagtccattccattccagtccatttaattcaagggcattccactccattccattccattccatttcatattattccattccattcaattccattccagatgattccattccattctataccattgctctctgttccattccattccatctgtctccattcctttcgtttcgattcctttccattccattccattacatttgatcctattttattaaattgcattctattcgagtgatttccattcgagtcctttccattcgattccattccattctattccattcctttagattccattccattccgttccgttcacatcaattcctggcgattccattacattcgatttcttgccattcgattccattccttttgactccatttcattcgattccattccattccattaatttccattccattcgagacctttccattgcagtcttttcccttcgagtccattccgttcgattcccttccgttcgattcccttccattcgattccattccattggagtccgtaccagtcgagtccattctattccagtccattagtttcgactccattgcattcgagtgcattccattccgtggctgtccattccattccgtttgatgccattccatacgattccattcaattcgagaccattctattcctgtccattccttgtggttcgattccatttcactctagtccattccattccattcaattccattcgactctattccgttccattcaattccattccattcgattccatttttttcgacaaccttccattacactcccttccattccagtgcattccattccagtctcttcagttcgattccattccattcgtttcgattcctttccattccagcccattccattccattccattcctttcctttccgtttcattagattccattgcattccattccattcaattcaattccgtgctattcaatttgattcatttccatttaattccattccattagattccattccgtacgattccattccttttgaatccattccattggagtccattcacttccagaacattccattccagtcgaatccattcgagtacattccattaaagttcattacattctaatacattccattccattgcattccattccattccattcgatgccattcgattccattccatgccaaatcattgcattcctttccattccgttcctatcaattccattccattcgatttagttcgattctattcacttccattccattcgattccattccattggagtcaattcctttcgacacccagcctttccagtcaatgattttggattccatttttttgcattccattacattctatgacattcgattccgtttcattgcattccattccatacatttttattccattcgagaccgtagcattccactttattccaggcctgtccattacactacattcccttccattccaatgaattccattccattccaatccattcctttcctttcgcttgcattccattctattctcttctactgcatacaatttcactccattcgttcccattccattcaattccattccattcaattccattccatttgtttccattctcttcgattccatttctttatattccatgccattcgattccattctattgggttgcattacattcgtgttcattccattccagaccattccatttgactccattcctttcgagccctttcaatttgagtccattcctttccagtccatttcactccagtccattactatccattccataccattccatcccattccattccattccattccattccattccattccattccattccattgcattccattccattgcactgcactccattccattacattctactctatctgagtcgatt

SEQ ID NO: 45062 - DNA, 2300 bp, Homo sapien
tcaaaaggaatggaatcgaatggcaagaaatcgaatgtaatggaatcgccaggaattgatgtgaacggaacggaatggaatggaatccaaaggaatggaatagaatggaatggaatcgaatggaaaggactcgaatggaaatcactcgaatagaatgcaatttaataaaataggatcaaatgtaatggaatggaatggaaaggaatcgaaacgaaaggaatggagacagatggaatggaatggaacagagagcaatggtatagaatggaatggaatcatctggaatggaattgaatggaatggaataatatgaaatggaatggaatggaatggaatggaatgcccttgaattaaatggactggaatggaatggactcaaacagagtggaatggaaagtgtggagatagaatggaatgaactcctttggaatggtgtagtatgcaatgcaatcgactggcagggaatcaaaaggaatgtaatcgaatggattggactggaatgcaatggactcgaagagattggaaacggaatgcaaaggaatggaatggaatagtatggaatgcaatggaagggaatggagtggaatagactagagtggaatggaatggactggaaagcaatggactggaatggaactttcttggatggattggaatcaaacggaatggaatgcaatgcaatcaaatggcatggaataaaatagaatgaaagagaatcaaatggaattgaatcgaatggaatcgaatggattggaaaggaatagaatggaatggaatggaattgactcaaatggaatggactagaatggaatggattcgaatggaaggcaaaggaatggaatctattggaatggactgtaatggaatggaatggaagggattggaatggactcgaatggaatggactgcaatagaaaggattcgaatggaatgaaaaagaattgaatggaatagaacagaatggaatcaaatcgaatgaaatggaatggaatagaaaggaatggaatgaaatggaatggaaaggattcgaatggaatgcaatcgaatggaatggaatcgaacggaatggaataaaatggaagaaaactggcaagaaatggaatcgaaatgaatggagtgttatggaacggactcaaaaggaattgaatgtaatagaattgagtggagtggactcgaatataatggactggaatggaatgaaatcacatggaatgggaacgaatggaatggaatggaaaggaatggaatccaatggaaaggaatcgaatggaagggaatgaaattgaatcaacaggaatggaagggaatagaatagacggtaatggaatggactcggatagaatggacacgaatgctcaaattaaatggactcgaattgaatggaaacgaaaggaatgttatcgaatggaattgaatcgattggaatgaaatcgcatagaatggagtgttatcaaatggaattgaatcgaaaggaaaggaagcgaatggactgaaatgaaatggaatggaattgaatggaaagtaatgcaatggaatagaatggaacgaaatttcacggaatggaatcaaactgaatggaatcaaatcaatggaatcaaatcaaatggaatggaaaggaattgaatggagtagatgggattggatgggattggaatgaaatgtactggaaaggactcgaatttcatgaaacggaatggaatgaattggaacggaatggactcgaatggaatggaatgtcatgggatggcatcaaatggaatgacatcaaatggaatggaatcgaatgcaatggaatgctatggaatggaatggaatgcattggaatggaatgtccgctaatggaatggattcgagtggaatggaattgaatataatggagtcgaatgaaatggaattgaaaggaatgggatcgaatacaatggaatatactggaatgtaacgtaatgaactcgaatgtaattgactggaatggaatgtacatgaatggaatgtaatcgaatggaaagtaatccaatggaatagaatctaatgcaataaaatcgactcagatagagtagaatgtaatggaatggagtgcagtgcaatggaatggaatgcaatggaatggaatggaatggaatggaatggaatggaatggaatggaatgggatggaatggtatggaatggatagtaatggactggagtgaaatggactggaaaggaatggactcaaattgaaagggctcgaaaggaatggagtcaaatggaatggtctggaatggaatgaacacgaatgtaatgcaacccaatagaatggaat

SEQ ID NO: 45063 - DNA, 2300 bp, Homo sapien
tattcctttccaatccattcgattccattcgattcaattccatttgattctctttcattctattttattccatgccatttgattgcattgcattccattccgtttgattccagtccatccaagaaagttccattccagtccattgctttccagtccattccattccactctagtctattccactccattcccttccattgcattccatactattccattccattcctttgcattccgtttccaatctattcgagtcctttgcattccagtccaatccattcgattacattccttttgattccctgccagtcgattgcattgcatactacaccattccaaaggagttcattccattctatctccacactttccattccactctgtttgagtccattccattccagtccatttaattcaagggcattccattccattccattccattccatttcatattattccattccattcaattccattccagatgattccattccattctataccattgctctctgttccattccattccatctgtctccattcctttcgtttcgattcctttccattccattccattacatttgatcctattttattaaattgcattctattcgagtgatttccattcgagtcctttccattcgattccattccattctattccattcctttggattccattccattccgttccgttcacatcaattcctggcgattccattacattcgatttcttgccattcgattccattccttttgactccatttcattcgattccattccattccattaatttccattccattcgagacctttccattgcagtcttttcccttcgagtccattccgttcgattcccttccgttcgattcccttccattcgattccattccattggagtccgtaccagtcgagtccattctattccagtccatttgtttcgactccattgcattcgagtgcattccattccgtggctgtccattccattccgtttgatgccattccatacgattccattcaattcgagaccattctattcctgtccattccttgtggttcgattccatttcactctagtccattccattccattcaattccattcgactctattccgttccattcaattccattccattcgattccatttttttcgagaaccttccattacactcccttccattccagtgcattccattccagtctcttcacttcgattccattccattcgtttcgattcctttccattccagcccattccattccattccattcctttcctttccgtttcattagattccattgcattccattccattcaattcaattccgtgctattcaatttgattcatttccatttaattccattccattagattccattccgtacgattccattccttttgaatccattccattggagtccattcacttccagaacattccattccagtcgaatccattcgagtacattccattaaagttcattacattctaatacattccattccattgcattccattccattccattcgatgccattcgattccattccatgccaaatcattgcattcctttccattccgttcctatcaattccattccattcgatttagttcgattctattcacttccattccattcgattccattccattggagtcaattcctttcgacacccagcctttccagtcaatgattttggattccatttttttgcattccattacattctatgacattcgattccgtttcattgcattccattccatacatttttattccattcgagaccgtagcattccactttattccaggcctgtccattacactacattcccttccattccaatgaattccattccattccaatccattcctttcctttcgcttgcattccattctattctcttctactgcatacaatttcactccattcgttcccattccattcaattccattccattcaattccattccatttgtttccattctcttcgattccatttctttatattccatgccattcgattccattctattgggttgcattacattcgtgttcattccattccagaccattccatttgactccattcctttcgagccctttcaatttgagtccattcctttccagtccatttcactccagtccattactatccattccataccattccatcccattccattccattccattccattccattccattccattccattccattccattccattgcattccattccattccattccattgcactgcactccattccattacatt

SEQ ID NO: 45064 - DNA, 2300 bp, Homo sapien
tggcaagaaatcgaatgtaatggaatcgccaggaattgatgtgaacggaacggaatggaatggaatccaaaggaatggaatagaatggaatggaatcgaatggaaaggactcgaatggaaatcactcgaatagaatgcaatttaataaaataggatcaaatgtaatggaatggaatggaaaggaatcgaaacgaaaggaatggagacagatggaatggaatggaacagagagcaatggtatagaatggaatggaatcatctggaatggaattgaatggaatggaataatatgaaatggaatggaatggaatggaatggaatgcccttgaattaaatggactggaatggaatggactcaaacagagtggaatggaaagtgtggagatagaatggaatgaactcctttggaatggtgtagtatgcaatgcaatcgactggcagggagtcaaaaggtatgtaatcgaatggattggactggaatgcaaaggactcgaatagattggaaacggaatgcaaaggaatggaatggaatagtatggaatgcaatggaagggaatgcagtggaatagactagagtggaatggaatggactggaaagcaatggactggaatggaactttcttggatggactggaatcaaacggaatggaatgcagtgcaatcaaatggcatggaataaaatagaatgaaagagaatcaaatggaattgaatcgaatggaatcgaatggattggaaaggaatagaatggaatggaatggaattgactcaaatggaatggactagaatggaatggattcgaatggaaggcaaaggaatggaatctattggaatggactgtaatggaatggaatggaagggattggaatggactcgaatggaatggactgcaatagaaaggattcgaatggaatgaaaaagaattgaatggaatagaacagaatggaatcaaatcgaatgaaatggaatggaatagaaaggaatggaatgaaatggaatggaaaggattcgaatgtaatgcaatcgaatggaatggaatcgaacggaatggaataaaatggaagaaaactggcaagaaatggaatcgaaatgaatggagtgttatggaacggactcaaaaggaattgaatgtaatagaatggagtggagtggactcgaatataatggactggaatggaatgaaatcacatggaatgggaacgaatggaatggaatggaaaggaatggaatcgaatggaaaggaatcgaatggaagggaatgaaattgaatcaacaggaatggaagggaatagaatagactgtaatggaatggactcgaatagaatggacacgaatgctcaaattaaatggactcgaatggaatggaaacgaaaggaatgtcatcgaatggaattcaatcgattggaatgaaatcgcatagaatggagtggaatcaaatggaattgaatcgaaaggaaaggaagcgaatggactgaaatgaaatggaatggaattgaatggaaagtaatgcaatggaatagaatggaacgaaatttcacggaatggaatcaaactgaatggaatcaaatcaatggaatcaaatcaaatggaatggaaaggaattgaatggagtagatgggattggatgggattggaatgaaatgtactggaaaggactcgaatttcatgaaacggaatggaatgaattggaacggaatggactcgaatggaatggaatgtcatgggatggcatcaaatggaatggcatcaaatggaatggaatcgaatgcaatggaatgctatggaatggaatggaatgcattggaatggaatgtcctctaatggagtggattcgagtggaatggaattgaatataatggagtcgaatgaaatggaattgaaaggaatgggatcgaatacaatggaatatactggaatgtaacgtaatgaactcgaatgtaattgactggaatggaatgtacatgaatggaatgtaatcgaatggaaagtaatccaatggaatagaatctaatgcaataaaatcgactcagatagagtagaatgtaatggaatggagtgcagtgcaatggaatggaatggaatggaatgcaatggaatggaatggaatggaatggaatggaatggaatggaatggaatggaatggaatgggatggaatggtatggaatggatagtaatggactggagtgaaatggactggaaaggaatggactcaaattgaaagggctcgaaaggaatggagtcaaatggaatggtctggaatggaatgaacacgaatgtaatgcaacccaatagaatggaat

SEQ ID NO: 45065 - DNA, 2300 bp, Homo sapien
tccattccattccattgcattccattccattccattccattgcactgcactccattccattacattctactctatctgagtcgattttattgcattagattctattccattggattactttccattcgattacattccattcatgtacattccattccagtcaattacattcgagttcattacgttacattccagtatattccattgtattcgatcccattcctttcaattccatttcattcgactccattatattcaattccattccactcgaatccactccattagaggacattccattccaatgcattccattccattccatagcattccattgcattcgattccattccatttgatgccattccatttgatgccatcccatgacattccattccattcgagtccattccgttccaattcattccattccgtttcatgaaattcgagtcctttccagtacatttcattccaatcccatccaatcccatctactccattcaattcctttccattccatttgatttgattccattgatttgattccattcagtttgattccattccgtgaaatttcgttccattctattccattgcattactttccattcaattccattccatttcatttcagtccattcgcttcctttcctttcgattcaattccatttgattccactccattctatgcgatttcattccaatcgattgaattccattcgatgacattcctttcgtttccattccattcgagtccatttaatttgagcattcgtgtccattctattcgagtccattccattacagtctattctattcccttccattcctgttgattcaatttcattcccttccattcgattcctttccattcgattccattcctttccattccattccattcgttcccattccatgtgatttcattccattccagtccattatattcgagtccactccactccattctattacattcaattccttttgagtccgttccataacactccattcatttcgattccatttcttgccagttttcttccattttattccattccgttcgattccattccattcgattgcattacattcgaatcctttccattccatttcattccattcctttctattccattccatttcattcgatttgattccattctgttctattccattcaattctttttcattccattcgaatcctttctattgcagtccattccattcgagtccattccaatcccttccattccattccattacagtccattccaatagattccattcctttgccttccattcgaatccattccattctagtccattccatttgagtcaattccattccattccattctattcctttccaatccattcgattccattcgattcaattccatttgattctctttcattctattttattccatgccatttgattgcactgcattccattccgtttgattccagtccatccaagaaagttccattccagtccattgctttccagtccattccattccactctagtctattccactgcattcccttccattgcattccatactattccattccattcctttgcattccgtttccaatctattcgagtcctttgcattccagtccaatccattcgattacataccttttgactccctgccagtcgattgcattgcatactacaccattccaaaggagttcattccattctatctccacactttccattccactctgtttgagtccattccattccagtccatttaattcaagggcattccattccattccattccattccatttcatattattccattccattcaattccattccagatgattccattccattctataccattgctctctgttccattccattccatctgtctccattcctttcgtttcgattcctttccattccattccattacatttgatcctattttattaaattgcattctattcgagtgatttccattcgagtcctttccattcgattccattccattctattccattcctttggattccattccattccgttccgttcacatcaattcctggcgattccattacattcgatttcttgccattcgattccattccttttgactccatttcattcgattccattccattccattaatttccattccattcgagacctttccattgcagtcttttcccttcgagtccattccgttcgattccattccgttcgattcccttccattcgattccattccattggagtccgtaccagtcgagtccattctattccagtccatt

SEQ ID NO: 45066 - DNA, 2300 bp, Homo sapien
attggaatggaatggaattcattggaatggaagggaatgtagtgtaatggacaggcctggaataaagtggaatgctacggtctcgaatggaataaaaatgtatggaatggaatgcaatgaaacggaatcgaatgtcatagaatgtaatggaatgcaaaaaatggaatccaaaatcattgactggaaaggctgggtgtcgaaaagaaatgactccaatggaatggaatcgaatggaatggaagtgaatagaatcgaactaaatcgaatggaatggaattgataggaacggaatggaaaggaatgcaatgatttggcatggaatggaatcgaatggcatcgaatggaatggaatggaatgcaatggaatggaatgtattagaatgtaatgaactttaatggaatgtactcgaatggattcgactggaatggaatgttctggaagtgaatggactccaatggaatggattcaaaaggaatggaatcgtacggaatggaatctaatggaatggaattaaatggaaatgaatcaaattgaatagcacggaattgaattgaatggaatggaatgcaatggaatctaatgaaacggaaaggaaaggaatggaatggaatggaatgggctggaatggaaaggaatcgaaacgaatggaatggaatcgaagtgaagagactggaatggaatgcactggaatggaagggagtgtaatggaaggttctcgaaaaaaatggaatcgaatggaatggaattgaatggaacggaatagagtcgaatggaattgaatggaatggaatggactagagtgaaatggaatcgaaccacaaggaatggacaggaatagaatggtctcgaattgaatggaatcgtatgtaatggcatcaaacggaatggaatggacagccacggaatggaatgcactcgaatgcaatggagtcgaaactaatggactggaatagaatggactcgactggtacggactccaatggaatggaatcgaatggaagggaatcgaacggaatggaatcgaacggaatggactcgaagggaaaagactgcaatggaaaggtctcgaatggaatggaaattaatggaatggaatggaatcgaatgaaatggagtcaaaaggaatggaatcgaatggcaagaaatcgaatgtaatggaatcgccaggaattgatgtgaacggaacggaatggaatggaatccaaaggaatggaatagaatggaatggaatcgaatggaaaggactcgaatggaaatcactcgaatagaatgcaatttaataaaataggatcaaatgtaatggaatggaatggaaaggaatcgaaacgaaaggaatggagacagatggaatggaatggaacagagagcaatggtatagaatggaatggaatcatctggaatggaattgaatggaatggaataatatgaaatggaatggaatggaatggaatggaatgcccttgaattaaatggactggaatggaatggactcaaacagagtggaatggaaagtgtggagatagaatggaatgaactcctttggaatggtgtagtatgcaatgcaatcgactggcagggagtcaaaaggtatgtaatcgaatggattggactggaatgcaaaggactcgaatagattggaaacggaatgcaaaggaatggaatggaatagtatggaatgcaatggaagggaatgcagtggaatagactagagtggaatggaatggactggaaagcaatggactggaatggaactttcttggatggactggaatcaaacggaatggaatgcagtgcaatcaaatggcatggaataaaatagaatgaaagagaatcaaatggaattgaatcgaatggaatcgaatggattggaaaggaatagaatggaatggaatggaattgactcaaatggaatggactagaatggaatggattcgaatggaaggcaaaggaatggaatctattggaatggactgtaatggaatggaatggaagggattggaatggactcgaatggaatggactgcaatagaaaggattcgaatggaatgaaaaagaattgaatggaatagaacagaatggaatcaaatcgaatgaaatggaatggaatagaaaggaatggaatgaaatggaatggaaaggattcgaatgtaatgcaatcgaatggaatggaatcgaacggaatggaataaaatggaagaaaactggcaagaaatggaatcgaaatgaatggagtgttatggaacggactcaaaaggaattgaatgtaatagaatggagtggagtggactcgaatataatg

SEQ ID NO: 45067 - DNA, 2300 bp, Homo sapien
ctattcctttccaatccattcgattccattcgattcaattccatttgattctctttcattctattttattccatgccatttgattgcactgcattccattccgtttgattccagtccatccaagaaagttccattccagtccattgctttccagtccattccattccactctagtctattccactgcattcccttccattgcattccatactattccattccattcctttgcattccgtttccaatctattcgagtcctttgcattccagtccaatccattcgattacataccttttgactccctgccagtcgattgcattgcatactacaccattccaaaggagttcattccattctatctccacactttccattccactctgtttgagtccattccattccagtccatttaattcaagggcattccattccattccattccattccatttcatattattccattccattcaattccattccagatgattccattccattctataccattgctctctgttccattccattccatctgtctccattcctttcgtttcgattcctttccattccattccattacatttgatcctattttattaaattgcattctattcgagtgatttccattcgagtcctttccattcgattccattccattctattccattcctttggattccattccattccgttccgttcacatcaattcctggcgattccattacattcgatttcttgccattcgattccattccttttgactccatttcattcgattccattccattccattaatttccattccattcgagacctttccattgcagtcttttcccttcgagtccattccgttcgattccattccgttcgattcccttccattcgattccattccattggagtccgtaccagtcgagtccattctattccagtccattagtttcgactccattgcattcgagtgcattccattccgtggctgtccattccattccgtttgatgccattacatacgattccattcaattcgagaccattctattcctgtccattccttgtggttcgattccatttcactctagtccattccattccattcaattccattcgactctattccgttccattcaattccattccattcgattccatttttttcgagaaccttccattacactcccttccattccagtgcattccattccagtctcttcacttcgattccattccattcgtttcgattcctttccattccagcccattccattccattccattcctttcctttccgtttcattagattccattgcattccattccattcaattcaattccgtgctattcaatttgattcatttccatttaattccattccattagattccattccgtacgattccattccttttgaatccattccattggagtccattcacttccagaacattccattccagtcgaatccattcgagtacattccattaaagttcattacattctaatacattccattccattgcattccattccattccattcgatgccattcgattccattccatgccaaatcattgcattcctttccattccgttcctatcaattccattccattcgatttagttcgattctattcacttccattccattcgattccattccattggagtcatttcttttcgacacccagcctttccagtcaatgattttggattccattttttgcattccattacattctatgacattcgattccgtttcattgcattccattccatacatttttattccattcgagaccgtagcattccactttattccaggcctgtccattacactacattcccttccattccaatgaattccattccattccaatccattcctttcctttcgcttgcattccattctattctcttctactgcatacaatttcactccattcgttcccattccattcaattccattccattcaattccattccatttgtttccattctcttcgattccatttctttatattccatgccattcgattccattctattgggttgcattacattcgtgttcattccattccagaccattccatttgactccattcctttcgagccctttcaatttgagtccattcctttccagtccatttcactccagtccattactatccattccataccattccatcccattccattccattccattccattccattccattccattccattccattccattgcattccattccattccattccattgcactgcactccattccattacattctact

SEQ ID NO: 45068 - DNA, 2300 bp, Homo sapien
ccattccattccattccattccattccattgcattccattccattccattccattgcactgcactccattccattacattctactctatctgagtcgattttattgcattagattctattccattggattactttccattcgattacattccattcatgtacattccattccagtcaattacattcgagttcattacgttacattccagtgtattccattgtattcgatcccattcctttcaattccatttcattcgactccattatattcaattccattccactcgaatccattccattagaggacattccattccaatgcattccattccattccatagcattccattgcattcgattccattccatttgatgtcattccatttgatgccatcccatgacattccattccattcgagtccattccgttccaattcattccattccgtttcatgaaattcgagtcctttccagtacatttcattccaatcccatccaatcccatctactccattcaattcctttccattccatttgatttgattccattgatttgattccattcagtttgattccattccgtgaaatttcgttccattctattccattgcattactttccattcaattccattccatttcatttcagtccattcgcttcctttcctttcgattcaattccatttgattccactccattctatgcgatttcattccaatcgattcaattccattcgatgacattcctttcgtttccattccattcgagtccatttaatttgagcattcgtgtccattctattcgagtccattccattacagtctattctattccttccattcgtgttgattcaatttcattcccttccatcgattcctttccatgatccattcctttccatccattccattgtcccattccatgtatttcatccattccagtccattaattcgagccacccatccattctattacattcaattccttttgagtccgttccataacactccattcatttcgattccatttcttgccagttttcttccattttattccattccgttcgattccattccattcgattgcattccattcgaatcctttccattccatttcattccattcctttctattccattccatttcattcgatttcattccattctgttctattccattcaattctttttcattccattcgaatcctttctattgcagtccattccattcgagtccattccaatcccttccattccattccattacagtccattccaatagattccattcctttgccttccattcgaatccattccattctagtccattccatttgagtcaattccattccattccattctattcctttccaatccattcgattccattcgattcaattccatttgattctctttcattctattttattccatgccatttgattgcactgcattccattccgtttgattccagtccatccaagaaagttccattccagtccattgctttccagtccattccattccactctagtctattccactccattcccttccattgcattccatactattccattccattcctttgcattccgtttccaatctattcgagtccattgcattccagtccaatccattcgattacattccttttgattccctgccagtcgattgcattgcatactacaccattccaaaggagttcattccattctatctccacactttccattccactctgtttgagtccattccattccagtccatttaattcaagggcattccattccattccattccattccatttcatattattccattccattcaattccattccagatgattccattccattctataccattgctctctgttccattccattccatctgtctccattcctttcgtttcgattcctttccattccattccattacatttgatcctattttattaaattgcattctattcgagtgatttccattcgagtcctttccattcgattccattccattctattccattcctttggattccattccattccgttccgttcacatcaattcctggcgattccattacattcgatttcttgccattcgattccattccttttgactccatttcattcgattccattccattccattaatttccattccattcgagacctttccattgcagtcttttcccttcgagtccattccgttcgattcccttccgttcgattcccgtccattcgattccattccattggagtccgtaccagtcgagtccattctattccagtccatt

SEQ ID NO: 45069 - DNA, 2300 bp, Homo sapien
tccattccattccattgcattccattccattccattccattgcactgcactccattccattacattctactctatctgagtcgattttattgcattagattctattccattggattactttccattcgattacattccattcatgtacattccattccagtcaattacattcgagttcattacgttacattccagtatattccattgtattcgatcccattcctttcaattccatttcattcgactccattatattcaattccattccactcgaatccattccattagaggacattccattccaatgcattccattccattccatagcattccattgcattcgattccattccatttgatgccattccatttgatgccatcccatgacattccattccattcgagtccattccgttccaattcattccattccgtttcatgaaattcgagtcctttccagtacatttcattccaatcccatccaatcccatctactccattcaattcctttccattccatttgatttgattccattgatttgattccattcagtttgattccattccgtgaaatttcgttccattctattccattgcattactttccattcaattccattccatttcatttcagtccattcgcttcctttcctttcgattcaattccatttgattccactccattctatgcgatttcattccaatcgattcaattccattcgatgacattcctttcgtttccattccattcgagtccatttaatttgagcattcgtgtccattctattcgagtccattccattacagtctattctattcccttccattcgtgttgattcaatttcattcccttccattcgattcctttccattcgattccattcctttccattccattccattcgttcccattccatgtgatttcattccattccagtccattatattcgagtccactccactccattctattacattcaattccttttgagtccgttccataacactccattcatttcgattccatttcttgccagttttcttccattttattccattccgttcgattccattccattcgattgcattccattcgaatcctttccattccatttcattccattcctttctattccattccatttcattcgatttgattccattctgttctattccattcaattctttttcattccattcgaatcctttctattgcagtccattccattcgagtccattccaatcccttccattccattccattacagtccattccaatagattccattcctttgccttccattcgaatccattccattctagtccattccatttgagtcaattccattccattccattctattcctttccaatccattcgattccattcgattcaattccatttgattctctttcattctattttattccatgccatttgattgcactgcattccattccgtttgattccagtccatccaagaaagttccattccagtccattgctttccagtccattccattccactctagtctattccactccattcccttccattgcattccatactattccattccattactttgcattccgtttccaatctattcgagtccattgcattccagtccaatccattcgattacattccttttgattccctgccagtcgattgcattgcatactacaccattccaaaggagttcattccattctatctccacactttccattccactctgtttgagtccattccattccagtccatttaattcaagggcattccattccattccattccattccatttcatattattccattccattcaattccattccagatgattccattccattctataccattgctctctgttccattccattccatctgtctccattcctttcgtttcgattcctttccattccattccattacatttgatcctattttattaaattgcattctattcgagtgatttccattcgagtcctttccattcgattccattccattctattccattcctttggattccattccattccgttccgttcacatcaattcctggcgattccattacattcgatttcttgccattcgattccattccttttgactccatttcattcgattccattccattccattaatttccattccattcgagacctttccattgcagtcttttcccttcgagtccattccgttcgattcccttccattcgattccattccattggagtccgtaccagtcgagtccattctattccagtccattagtttcgactccatt

SEQ ID NO: 45070 - DNA, 2300 bp, Homo sapien
tcgaatggcaagaaatcgaatgtaatggaatcgccaggaattgatgtgaacggaacggaatggaatggaatccaaaggaatggaatagaatggaatggaatcgaatggaaaggactcgaatggaaatcactcgaatagaatgcaatttaacaaaataggatcaaatggaatggaatggaatggaaaggaatggaaacgaaaggaatggagacagatggaatggaatggaacagagagcaatggtatagaatggaatggaatcatctggaatggaattgaatggaatggaataatatgaaatggaatggaatggaatggaatggaatgcccttgaattaaatggactggaatggaatggactcaaacagagtggaatggaaagtgtggagatagaatggaatgaactcctttggaatggtgtagtatgcaatgcaatcgactggcagggaatcaaaaggaatgtaatcgaatggattggactggaatgcaatggactcgaatagattggaaacggaatgcaaaggaatggaatggaatagtatggaatgcaatggaagggaatggagtggaatagactagagtggaatggaatggactggaaagcaatggactggaatggaactttcttggatggactggaatcaaacggaatggaatgcagtgcaatcaaatggcatggaataaaatagaatgaaagagaatcaaatggaattgaatcgaatggaatcgaatggattggaaaggaatagaatggaatggaatggaattgactcaaatggaatggactagaatggaatggattcgaatggaaggcaaaggaatggaatctattggaatggactgtaatggaatggaatggaagggattggaatggactcgaatggaatggactgcaatagaaaggattcgaatggaatgaaaaagaattgaatggaatagaacagaatggaatgaaatcgaatgaaatggaatggaatagaaaggaatggaatgaaatggaatggaaaggattcgaatggaatgcaatcgaatggaatggaatcgaacggaatggaataaaatggaagaaaactggcaagaaatggaatcgaaatgaatggagtgttatggaacggactcaaaaggaattgaatgtaatagaatggagtggagtggactcgaatataatggactggaatggaatgaaatcacatggaatgggaacgaatggaatggaatggaaaggaatggaatcgaatggaaaggaatcgaatggaagggaatgaaattgaatcaacacgaatggaagggaatagaatagactgtaatggaatggactcgaatagaatggacacgaatgctcaaattaaatggactcgaatggaatggaaacgaaaggaatgtcatcgaatggaattgaatcgattggaatgaaatcgcatagaatggagtggaatcaaatggaattgaatcgaaaggaaaggaagcgaatggactgaaatgaaatggaatggaattgaatggaaagtaatgcaatggaatagaatggaacgaaatttcacggaatggaatcaaactgaatggaatcaaatcaatggaatcaaatcaaatggaatggaaaggaattgaatggagtagatgggattggatgggattggaatgaaatgtactggaaaggactcgaatttcatgaaacggaatggaatgaattggaacggaatggactcgaatggaatggaatgtcatgggatggcatcaaatggaatgacatcaaatggaatggaatcgaatgcaatggaatgctatggaatggaatggaatgcattggaatggaatgtccgctaatggaatggattcgagtggaatggaattgaatataatggagtcgaatgaaatggaattgaaaggaatgggatcgaatacaatggaatatactggaatgtaacgtaatgaactcgaatgtaattgactggaatggaatgtacatgaatggaatgtaatcgaatggaaagtaatccaatggaatagaatctaatgcaataaaatcgactcagatagagtagaatgtaatggaatggagtgcagtgcaatggaatggaatggaatggaatgcaatggaatggaatggaatggaatggaatggaatggaatggaatgagatggaatgggatggaatggtatggaatggatagtaatggactggagtgaaatggactggaaaggaatggactcaaattgaaaggtctcgaaaggaatggagtcaaatggaatggtctggaatggaatgaacacgaatgtaatgcaacccaatagaatggaat

SEQ ID NO: 45071 - DNA, 2300 bp, Homo sapien
tccattccattccattgcattccattccattccattccattgcactgcactccattccattacattctactctatctgagtcgattttattgcattagattctattccattggattactttccattcgattacattccattcatgtacattccattccagtcaattacattcgagttcattacgttacattccagtatattccattgtattcgatcccattcctttcaattccatttcattcgactccattatattcaattccattccactcgaatccattccattagcggacattccattccaatgcattccattccattccatagcattccattgcattcgattccattccatttgatgtcattccatttgatgccatcccatgacattccattccattcgagtccattccgttccaattcattccattccgtttcatgaaattcgagtcctttccagtacatttcattccaatcccatccaatcccatctactccattcaattcctttccattccatttgatttgattccattgatttgattccattcagtttgattccattccgtgaaatttcgttccattctattccattgcattactttccattcaattccattccatttcatttcagtccattcgcttcctttcctttcgattcaattccatttgattccactccattctatgcgatttcattccaatcgattcaattccattcgatgacattcctttcgtttccattccattcgagtccatttaatttgagcattcgtgtccattctattcgagtccattccattacagtctattctattcccttccattcgtgttgattcaatttcattcccttccattcgattcctttccattcgattccattcctttccattccattccattcgttcccattccatgtgatttcattccattccagtccattatattcgagtccactccactccattctattacattcaattccttttgagtccgttccataacactccattcatttcgattccatttcttgccagttttcttccattttattccattccgttcgattccattccattcgattgcattccattcgaatcctttccattccatttcattccattcctttctattccattccatttcattcgatttcattccattctgttctattccattcaattctttttcattccattcgaatcctttctattgcagtccattccattcgagtccattccaatcccttccattccattccattacagtccattccaatagattccattcctttgccttccattcgaatccattccattctagtccattccatttgagtcaattccattccattccattctattcctttccaatccattcgattccattcgattcaattccatttgattctctttcattctattttattccatgccatttgattgcactgcattccattccgtttgattccagtccatccaagaaagttccattccagtccattgctttccagtccattccattccactctagtctattccactccattcccttccattgcattccatactattccattccattcctttgcattccgtttccaatctattcgagtccattgcattccagtccaatccattcgattacattccttttgattccctgccagtcgattgcattgcatactacaccattccaaaggagttcattccattctatctccacactttccattccactctgtttgagtccattccattccagtccatttaattcaagggcattccattccattccattccattccatttcatattattccattccattcaattccattccagatgattccattccattctataccattgctctctgttccattccattccatctgtctccattcctttcgtttccattcctttccattccattccattccatttgatcctattttgttaaattgcattctattcgagtgatttccattcgagtcctttccattcgattccattccattctattccattcctttggattccattccattccgttccgttcacatcaattcctggcgattccattacattcgatttcttgccattcgattccattccttttgactccatttcattcgattccattccattccattaatttccattccattcgagacctttccattgcagtcttttcccttcgagtccattccgttcgattccattccgttcgattcccttccattcgattccattccattggagtccgtaccagtcgagtccattctattccagtccatt

SEQ ID NO: 45072 - DNA, 2300 bp, Homo sapien
ttggaatggaatggaattcattggaatggaagggaatgtagtgtaatggacaggtctggaataaagtggaatgctacggtctcgaatggaataaaaatgtatggaatggaatgcaatgaaacggaatcgaatgtcatagaatgtaatggaatgcaaaaaaatggaatccaaaatcattgactggaaaggctgggtgtcgaaaggaattgactccaatggaatggaatcgaatggaatggaagtgaatagaatcgaactaaatcgaatggaatggaattgataggaacggaatggaaaggaatgcaatgatttggcatggaatggaatcgaatggcatcgaatggaatggaatggaatgcaatggaatggaatgtattagaatgtaatgaactttaatggaatgtactcgaatggattcgactggaatggaatgttctggaagtgaatggactccaatggaatggattcaaaaggaatggaatcgtacggaatggaatctaatggaatggaattaaatggaaatgaatcaaattgaatagcacggaattgaattgaatggaatggaatgcaatggaatctaatgaaacggaaaggaaaggaatggaatggaatggaatgggctggaatggataggaatcgaaacgaatggaatggaatcgaagtgaagagactgtaatggaatgcactggaatggaagggagtgtaatggaaggctctcgaaaaaaatggaatcgaatggaatggaattgaatggaacggaatagagtcgaatggaattgaatggaatggaatggactagagtgaaatggaatcgaaccacaaggaatggacaggaatagaatggtctcgaattgaatggaatcgtatggaatggcatcaaacggaatggaatggacagccacggaatggaatgcactcgaatgcaatggagtcgaaactaatggactggaatagaatggactcgactggtacggactccaatggaatggaatcgaatggaagggaatcgaacggaatggaatcgaacggaatggactcgaagggaaaagactgcaatggaaaggtctcgaatggaatggaaattaatggaatggaatggaatcgaatgaaatggagtcaaaaggaatggaatcgaatggcaagaaatcgaatgtaatggaatcgccaggaattgatgtgaacggaacggaatggaatggaatccaaaggaatggaatagaatggaatggaatcgaatggaaaggactcgaatggaaatcactcgaatagaatgcaatttaacaaaataggatcaaatggaatggaatggaatggaaaggaatggaaacgaaaggaatggagacagatggaatggaatggaacagagagcaatggtatagaatggaatggaatcatctggaatggaattgaatggaatggaataatatgaaatggaatggaatggaatggaatggaatgcccttgaattaaatggactggaatggaatggactcaaacagagtggaatggaaagtgtggagatagaatggaatgaactcctttggaatggtgtagtatgcaatgcaatcgactggcagggaatcaaaaggaatgtaatcgaatggattggactggaatgcaatggactcgaatagattggaaacggaatgcaaaggaatggaatggaatagtatggaatgcaatggaagggaatggagtggaatagactagagtggaatggaatggactggaaagcaatggactggaatggaactttcttggatggactggaatcaaacggaatggaatgcagtgcaatcaaatggcatggaataaaatagaatgaaagagaatcaaatggaattgaatcgaatggaatcgaatggattggaaaggaatagaatggaatggaatggaattgactcaaatggaatggactagaatggaatggattcgaatggaaggcaaaggaatggaatctattggaatggactgtaatggaatggaatggaagggattggaatggactcgaatggaatggactgcaatagaaaggattcgaatggaatgaaaaagaattgaatggaatagaacagaatggaatgaaatcgaatgaaatggaatggaatagaaaggaatggaatgaaatggaatggaaaggattcgaatggaatgcaatcgaatggaatggaatcgaacggaatggaataaaatggaagaaaactggcaagaaatggaatcgaaatgaatggagtgttatggaacggactcaaaaggaattgaatgtaatagaatggagtggagtggactcgaatataatg

SEQ ID NO: 45073 - DNA, 2300 bp, Homo sapien
tccatcccattccattccattccattccattgcattccattccattccattccattgcactgcactccattccattacattctactctatctgagtcgattttattgcattagattctattccattggattactttccattcgattacattccattcatgtacattccattccagtcaattacattcgagttcattacgttacattccagtatattccattgtattcgatcccattcctttcaattccatttcattcgactccattatattcaattccattccactcgaatccattccattagaggacattccattccaatgcattccattccattccatagcattccattgcattcgattccattccatttgatgccattccgtttgatgccatcccatgacattccattccattcgagtccattccgttccaattcattccattccgtttcatgaaattcgagtcctttccagtacatttcattccaatcccatccaatcccatctactccattcaattcctttccattccatttgatttgattccattgatttgattccattcagtttgattccattccgtgaaatttcgttccattctattccattgcattactttccattcaattccattccatttcatttcagtccattcgcttcctttcctttcgattcaattccatttgattccactccattctatgcgatttcattccaatcgattcaattccattcgatgacattcctttcgtttccattccattcatgtccatttaatttgagcattcgtgtccattctattcgagtccattccattaccgtctattctattcccttccattcctgttgattcaatttcattcccttccattcgattcctttccattcgattccattcctttccattccattccattcgttcccattccatgtgatttcattccattccagtccattatattcgagtccactccactccattctattacattcaattccttttgagtccgttccataacactccattcatttcgattccatttcttgccagttttcttccattttattccattccattcgattgcattccattcgaatcctttccattccatttcattccattcctttctattccattccatttcattcgatttgattccattctgttctattccattcaattctttttcattccattcgaatcctttctattgcagtccattccattcgagtccattccaatcccttccattccattccattacagtccattccaatagattccattcctttgccttccattccaatccattccattctagtccattccatttgagtcaattccattccattccattctattcctttccaatccattcgattccattcgattcaattccatttgattctctttcattctattttattccatgccatttgattgcattgcattccattccgtttggttccagtccatccaagaaagttccattccagtccattgctttccagtccattccattccactctagtctattccactccattcccttccattgcattccatactattccattccattcctttgcattccgtttccaatctattcgagtccattgcattccagtccaatccattcgattacattccttttgattccctgccagtcgattgcattgcatactacaccattccaaaggagttcattccattctatctccacactttccattccactctgtttgagtccattccattccagtccatttaattcaagggcattccattccattccattccattccatttcatattattccattccattcaattccattccagatgattccattccattctataccattgctctctgttccattccattccatctgtctccattcctttcgtttcgattcctttccattccattccattacatttgatcctattttattaaattgcattctattcgagtgatttccattcgagtcctttccattcgattccattccattctattccattcctttggattccattccattccgttccgttcacatcaattcctggcgattccattacattcgatttcttgccattcgattccattccttttgactccatttcattcgattccattccattccattaatttccattccattcgagacctttccattgcagtcttttcccttcgagtccattccgttcgattccattccgttcgattcccttccattcgattccattccattggagtccgtaccagtcgagtccattctattccagtccatt

SEQ ID NO: 45074 - DNA, 2300 bp, Homo sapien
tattcctttccaatccattcgattccattcgattcaattccatttgattctctttcattctattttattccatgccatttgattgcattgcattccattccgtttggttccagtccatccaagaaagttccattccagtccattgctttccagtccattccattccactctagtctattccactccattcccttccattgcattccatactattccattccattcctttgcattccgtttccaatctattcgagtccattgcattccagtccaatccattcgattacattccttttgattccctgccagtcgattgcattgcatactacaccattccaaaggagttcattccattctatctccacactttccattccactctgtttgagtccattccattccagtccatttaattcaagggcattccattccattccattccattccatttcatattattccattccattcaattccattccagatgattccattccattctataccattgctctctgttccattccattccatctgtctccattcctttcgtttcgattcctttccattccattccattacatttgatcctattttattaaattgcattctattcgagtgatttccattcgagtcctttccattcgattccattccattctattccattcctttggattccattccattccgttccgttcacatcaattcctggcgattccattacattcgatttcttgccattcgattccattccttttgactccatttcattcgattccattccattccattaatttccattccattcgagacctttccattgcagtcttttcccttcgagtccattccgttcgattccattccgttcgattcccttccattcgattccattccattggagtccgtaccagtcgagtccattctattccagtccattagttttgactccattgcattcgagtgcattccattccgtggctgtccattccattccgtttgatgccattccatacgattccattcaattcgagaccattctattcctgtccattccttgtggttcgattccatttcactctagtccattccattccattcaattccattcgactctattccgttccattcaattccattccattcgattccatttttttcgagaaccttccattacactcccttccattccagtgcattccattccagtctcttcacttcgattccattccattcgtttcgattcctttccattccagcccattccattccattccattcctttcctttccgtttcattagattccattgcattccattccattcaattcaattccgtgctattcaatttgattcatttccatttaattccattccattagattccattccgtacgattccattccttttgaatccattccattggagtccattcacttccagaacattccattccagtcgaatccattcgagtacattccattaaagttcattccattctaatacattccattccattgcattccattccattccattcgatgccattcgattccattccatgccaaatcattgcattcttttccattccgttcctatcaattccattccattcgatttagttcgattctattcacttccattccattcgattccattccattggagtcaattcctttcgacacccagcctttccagtcaatgattttggattccatttttttgcattccattacattctatgacattcgattccgtttcattgcattccattccatacatttttattccattcgagaccgtagcattccactttattccaggcctgtccattacactacattcccttccattccaatgaattccattccattccaatccattcctttcctttcgcttgcattccattctattctcttctactgcatacaatttcactccattcgttcccattccattcaattccattccattcaattccattccatttgtttccattctcttcgattccatttctttatattccatgccattcgattccattctattgggttgcattacattcgtgttcattccattccagaccattccatttgactccattcctttcgagccctttcaatttgagtccattcctttccagtccatttcactccagtccattactatccattccataccattccatcccattccattccattccattccattccattccattccattccattccattgcattccattccattccattccattgcactgcactccattccattacattctactctatc

SEQ ID NO: 45075 - DNA, 2300 bp, Homo sapien
tggaatcgaatggcaagaaatcgaatgtaatggaatcgccaggaattgatgtgaacggaacggaatggaatggaatccaaaggaatggaatagaatggaatggaatcgaatggaaaggactcgaatggaaatcactcgaatagaatgcaatttaacaaaataggatcaaatggaatggaatggaatggaaaggaatggaaacgaaaggaatggagacagatggaatggaatggaacagagagcaatggtatagaatggaatggaatcatctggaatggaattgaatggaatggaataatatgaaatggaatggaatggaatggaatggaatgcccttgaattaaatggactggaatggaatggactcaaacagagtggaatggaaagtgtggagatagaatggaatgaactcctttggaatggtgtagtatgcaatgcaatcgactggcagggaatcaaaaggaatgtaatcgaatggattggactggaatgcaatggactcgaatagattggaaacggaatgcaaaggaatggaatggaatagtatggaatgcaatggaagggaatggagtggaatagactagagtggaatggaatggactggaaagcaatggactggaatggaactttcttggatggactggaaccaaacggaatggaatgcaatgcaatcaaatggcatggaataaaatagaatgaaagagaatcaaatggaattgaatcgaatggaatcgaatggattggaaaggaatagaatggaatggaatggaattgactcaaatggaatggactagaatggaatggattcgaatggaaggcaaaggaatggaatctattggaatggactgtaatggaatggaatggaagggattggaatggactcgaatggaatggactgcaatagaaaggattcgaatggaatgaaaaagaattgaatggaatagaacagaatggaatcaaatcgaatgaaatggaatggaatagaaaggaatggaatgaaatggaatggaaaggattcgaatggaatgcaatcgaatggaatggaatcgaacggaatggaataaaatggaagaaaactggcaagaaatggaatcgaaatgaatggagtgttatggaacggactcaaaaggaattgaatgtaatagaatggagtggagtggactcgaatataatggactggaatggaatgaaatcacatggaatgggaacgaatggaatggaatggaaaggaatggaatcgaatggaaaggaatcgaatggaagggaatgaaattgaatcaacaggaatggaagggaatagaatagacggtaatggaatggactcgaatagaatggacacgaatgctcaaattaaatggactcgaatggaatggaaacgaaaggaatgtcatcgaatggaattgaatcgattggaatgaaatcgcatagaatggagtggaatcaaatggaattgaatcgaaaggaaaggaagcgaatggactgaaatgaaatggaatggaattgaatggaaagtaatgcaatggaatagaatggaacgaaatttcacggaatggaatcaaactgaatggaatcaaatcaatggaatcaaatcaaatggaatggaaaggaattgaatggagtagatgggattggatgggattggaatgaaatgtactggaaaggactcgaatttcatgaaacggaatggaatgaattggaacggaattgactcgaatggaatggaatgtcatgggatggcatcaaatggaatgacatcaaatggaatggaatcgaatgcaatggaatgctatggaatggaatggaatgcattggaatggaatgtccgctaatggaatggattcgagtggaatggaattgaatataatggagtcgaatgaaatggaattgaaaggaatgggatcgaatacaatggaatatactggaatgtaacgtaatgaactcgaatgtaattgactggaatggaatgtacatgaatggaatgtaatcgaatggaaagtaatccaatggaatagaatctaatgcaataaaatcgactcagatagagtagaatgtaatggaatggagtgcagtgcaatggaatggaatggaatggaatgcaatggaatggaatggaatggaatggaatggaatggaatggaatggaatgggatggaatggtatggaatggatagtaatggactggagtgaaatggactggaaaggaatggactcaaattgaaagggctcgaaaggaatggagtcaaatggaatggtctggaatggaatgaacacgaatgtaatgcaacccaatagaatggaat

SEQ ID NO: 45076 - DNA, 2300 bp, Homo sapien
ttggaatggaatggaattcattggaatggaagggaatgtagtgtaatggacaggcctggaataaagtggaatgctacggtctcgaatggaataaaaatgtatggaatggaatgcaatgaaacggaatcgaatgtcatagaatgtaatggaatgcaaaaaaatggaatccaaaatcactgactggagaggctgggtgtcgaaaggaattgactccaatggaatggaatcgaatggaatggaagtgaatagaatcgaactaaatcgaatggaatggaattgataggaacggaatggaaaggaatgcaatgatttggcatggaatggaatcgaatggcatcgaatggaatggaatggaatgcaatggaatggaatgtattagaatgtaatgaactttaatggaatgtactcgaatggattcgactggaatggaatgttctggaagtgaatggactccaatggaatggattcaaaaggaatggaatcgtacggaatggaatctaatggaatggaattaaatggaaatgaatcaaattgaatagcatggaattgaattgaatggaatggaatgcaatggaatctaatgaaacggaaaggaaaggaatggaatggaatggaatgggctggaatggataggaatcgaaacgaatggaatggaatcgaagtgaagagactgtaatggaatgcactggaatggaagggagtgtaatggaaggctctcgaaaaaaatggaatcgaatggaatggaattgaatggaacggaatagagtcgaatggaattgaatggaatggaatggactagagtgaaatggaatcgaaccacaaggaatggacaggaatagaatggtctcgaattgaatggaatcgtatggaatggcatcaaacggaatggaatggacagccacggaatggaatgcactcgaatgcaatggagtcaaaactaatggactggaatagaatggactcgactggtacggactccaatggaatggaatcgaatggaagggaatcgaacggaatggaatcgaacggaatggactcgaagggaaaagactgcaatggaaaggtctcgaatggaatggaaattaatggaatggaatggaatcgaatgaaatggagtcaaaaggaatggaatcgaatggcaagaaatcgaatgtaatggaatcgccaggaattgatgtgaacggaacggaatggaatggaatccaaaggaatggaatagaatggaatggaatcgaatggaaaggactcgaatggaaatcactcgaatagaatgcaatttaacaaaataggatcaaatggaatggaatggaatggaaaggaatggaaacgaaaggaatggagacagatggaatggaatggaacagagagcaatggtatagaatggaatggaatcatctggaatggaattgaatggaatggaataatatgaaatggaatggaatggaatggaatggaatgcccttgaattaaatggactggaatggaatggactcaaacagagtggaatggaaagtgtggagatagaatggaatgaactcctttggaatggtgtagtatgcaatgcaatcgactggcagggaatcaaaaggaatgtaatcgaatggattggactggaatgcaatggactcgaatagattggaaacggaatgcaaaggaatggaatggaatagtatggaatgcaatggaagggaatggagtggaatagactagagtggaatggaatggactggaaagcaatggactggaatggaactttcttggatggactggaaccaaacggaatggaatgcaatgcaatcaaatggcatggaataaaatagaatgaaagagaatcaaatggaattgaatcgaatggaatcgaatggattggaaaggaatagaatggaatggaatggaattgactcaaatggaatggactagaatggaatggattcgaatggaaggcaaaggaatggaatctattggaatggactgtaatggaatggaatggaagggattggaatggactcgaatggaatggactgcaatagaaaggattcgaatggaatgaaaaagaattgaatggaatagaacagaatggaatcaaatcgaatgaaatggaatggaatagaaaggaatggaatgaaatggaatggaaaggattcgaatggaatgcaatcgaatggaatggaatcgaacggaatggaataaaatggaagaaaactggcaagaaatggaatcgaaatgaatggagtgttatggaacggactcaaaaggaattgaatgtaatagaatggagtggagtggactcgaatataatg

SEQ ID NO: 45077 - DNA, 2300 bp, Homo sapien
atggattggaatggaatggaattcattggaatggaagggaatgtagtgtaatggacaggcctggaataaagtggaatgctacggtctcgaatggaataaaaatgtatggaatggaatgcaatgaaacggaatcgaatgtcatagaatgtaatggaatgcaaaaaaatggaatccaaaatcactgactggagaggctgggtgtcgaaaggaattgactccaatggaatggaatcgaatggaatggaagtgaatagaatcgaactaaatcgaatggaatggaattgataggaacggaatggaaaggaatgcaatgatttggcatggaatggaatcgaatggcatcgaatggaatggaatggaatgcaatggaatggaatgtattagaatgtaatgaactttaatggaatgtactcgaatggattcgactggaatggaatgttctggaagtgaatggactccaatggaatggattcaaaaggaatggaatcgtacggaatggaatctaatggaatggaattaaatggaaatgaatcaaattgaatagcacggaattgaattgaatggaatggaatgcaatggaatctaatgaaacggaaaggaaaggaatggaatggaatgggctggaatggataggaatcgaaacgaatggaatggaatcgaagtgaagagactgtaatggaatgcactggaatggaagggagtgtaatggaaggctctcgaaaaaaatggaatcgaatggaatggaattgaatggaacggaatagagtcgaatggaattgaatggaatggaatggactagagtgaaatggaatcgaaccacaaggaatggacaggaatagaatggtctcgaattgaatggaatcgtatggaatggcatcaaacggaatggaatggacagccacggaatggaatgcactcgaatgcaatggagtcgaaactaatggactggaatagaatggactcgactggtacggactccaatggaatggaatcgaatggaagggaatcgaacggaatggaatcgaacggaatggactcgaagggaaaagactgcaatggaaaggtctcgaatggaatggaaattaatggaatggaatggaatcgaatgaaatggagtcaaaaggaatggaatcgaatggcaagaaatcgaatgtaatggaatcgccaggaattgatgtgaacggaacggaatggaatggaatccaaaggaatggaatagaatggaatggaatcgaatggaaaggactcgaatggaaatcactcgaatagaatgcaatttaataaaataggatcaaatgtaatggaatggaatggaaaggaatcgaaacgaaaggaatggagacagatggaatggaatggaacagagagcaatggtatagaatggaatggaatcatctggaatggaattgaatggaatggaataatatgaaatggaatggaatggaatggaatggaatgcccttgaattaaatggactggaatggaatggactcaaacagagtggaatggaaagtgtggagatagaatggaatgaactcctttggaatggtgtagtatgcaatgcaatcgactggcagggaatcaaaaggaatgtaatcgaatggattggactggaatgcaatggactcgaatagattggaaacggaatgcaaaggaatggaatggaatagtatggaatgcaatggaagggaatggagtggaatagactagagtggaatggaatggactggaaagcaatggactggaatggaactttcttggatggactggaatcaaacggaatggaatgcaatgcaatcaaatggcatggaataaaatagaatgaaagagaatcaaatggaattgaatcgaatggaatcgaatggattggaaatgaatagaatggaatggaatggaattgactcaaatggaatggactagaatggaatggattcgaacggaaagcaaaggaatggaatctattggaatggactgtaatggaatggaatggaagggattggaatggactcgaatggaatggactgcaatagaaaggattcgaatggaatgaaaaagaattgaatggaatagaacagaatggaatcaaatcgaatgaaatggaatggaatagaaaggaatggaatgaaatggaatggaaaggattcgaatggaatgcaatcgaatggaatggaatcgaacggaatggaataaaatggaagaaaactggcaagaaatggaatcgaaatgaatggagtgttatggaacggactcaaaaggaattgaatgtaatagaatggagtggagtggactcgaatataatg

SEQ ID NO: 45078 - DNA, 2300 bp, Homo sapien
tccattccattccattgcattccattccattccattccattgcactgcactccattccattacattctactctatctgagtcgattttattgcattagattctattccattggattactttccattcgattacattccattcatgtacattccattccagtcaattacattcgagttcattacgttacattccagtatattccattgtattcgatcccattcctttcaattccatttcattcgactccattatattcaattccattccactcgaatccgttccattagaggacattccattccaatgcattccattccattccatagcattccactgcattcgattccattccatttgatgccattacatttgatgccatcccatgacattccattccattcgagtccattccgttccaattcattccattccgtttcatgaaattcgagtcctttccagtacatttcattccaatcccatccaatcccatctactccattcaattcctttccattccatttgatttgattccattgatttgattccattcagtttgattccattccgtgaaatttcgttccattctattccattgcattactttccattcaattccattccatttcatttcagtccattcgcttcctttcctttcgatttaattccatttgattccactccattctatgcgatttcattccaatcgattgaattccattcggtgacattcctttcgtttccattccattcgagtccatttaatttgagcattcgtgtccattctattcgagtccattccattacagtctattctattcccttccattcctgttgattcaatttcattcccttccattcgattcctttccattcgattccattcctttccattccattccattcgttcccattccatgtgatttcattccattccagtccattatattcgagtccactccactccattctattacattcaattccttttgagcccgttccataacactccattcatttcgattccatttcttgccagttttcttccattttcttccattccgttcgattccattccattcgattgcattccattcgaatcctttccattccatttcattccattcctttctattccattccatttcattcgatttgattccattctgttctattccattcaattctttttcattccattcgaatcctttctattgcagtccattccattcgagtccattccaatcccttccattccattccattacagtccattccaatagattccattcctttgccttccattcgaatccattccattctagtacattccatttgagtccattccattccattccattctattcctttccaatccattcgattccattcgattcaattccatttgattctctttcattctattttattccatgccatttgattgcattgcattccattccgtttgattccagtccatccaagaaagttccattccagtccattgctttccagtccattccattccactctagtctattccactccattcccttccattgcattccatactattccattccattcctttgcattccgtttccaatctattcgagtcctttgcattccagtccaatccattcgattacattccttttgattccctgccagtcgattgcattgcatactacaccattccaaaggagttcattccattctatctccacactttccattccactctgtttgagtccattccattccagtccatttaattcaagggcattccattccattccattccattccatttcatattattccattccattcaattccattccagatgattccattccattctataccattgctctctgttccattccattccatctgtctccattcctttcgtttcgattcctttccattccattccattacatttgatcctattttattaaattgcattctattcgagtgatttccattcgagtcctttccattcgattccattccattctattccattcctttggattccattccattccgttccgttcacatcaattcctggcgattccattacattcgatttcttgccattcgattccattccttttgactccatttcattcgattccattccattccattaatttccattccattcgagacctttccattgcagtcttttcccttcgagtccattccgttcgattcccttccgttcgattcccttccattcgattccattccattggagtccgtaccagtcgagtccattctattccagtccatt

SEQ ID NO: 45079 - DNA, 2300 bp, Homo sapien
tccattccattccattgcattccattccattccattccattgcactgcactccattccattacattctactctatctgagtcgattttattgcattagattctattccattggattactttccattcgattacattccattcatgtacattccattccagtcaattacattcgagttcattacgttacattccactatattccattgtattcgatcccattcctttcaattccatttcattcgactccattatattcaattccattccactcgaatccattccattagaggacattccattccaatgcattccattccattccatagcattccattgcattcgattccattccatttgatgccattccatttgatgccatcccatgacattccattccattcgagtccattccgttccaattcattccattccgtttcatgaaattcgagtcctttccagtacatttcattccaatcccatccaatcccatctactccattcaattcctttccattccatttgatttgattccattgatttgattccattcagtttgattccattccgtgaaatttcgttccattctattccattgcattactttccattcaattccattccatttcatttcagtccattcgcttcctttcctttcgattcaattccatttgattccactccattctatgcgatttcattccaatcgattcaattccattcgatgacattcctttcgtttccattccattcgagtccatttaatttgagcattcgtgtccattctattcgagtccattccattacagtctattctattcccttccattcctgttgattcaatttcattcccttccattcgattcctttccattcgattccattcctttccattccattccattcgttcccattccatgtgatttcattccattccagtccattatattcgagtccactccactccattctattacattcaattccttttgagtccgttccataacactccattcatttcgattccatttcttgccagttttcttccattttattccattccgttcgattccattccattcgattgcattccattcgaatcctttccattccatttcattccattcctttctattccattccatttcattcgatttcattccattctgttctattccattcaattctttttcattccattcgaatcctttctattgcagtccattccattcgagtccattccaatcccttccattccattccattacagtccattccaatagattccattcctttgccttccattcgaatccattccattctagtccattccatttgagtcaattccattccattccattctattcctttccaatccattcgattccattcgattcaattccatttgattctctttcattctaatttattccatgccatttgattgcattgcattccattccgtttgattccagtccatccaagaaagttccattccagtccattgctttccagtccattccattccactctagtctattccactccattcccttccattgcattccatactattccattccattcctttgcattccgtttccaatctattcgagtccattgcattccagtccaatccattcgattacattccttttgattccctgccagtcgattgcattgcatactacaccattccaaaggagttcattccattctatctccacactttccattccactctgtttgagtccattccattccagtccatttaattcaagggcattccattccattccattccattccatttcatattattccattccattcaattccattccagatgattccattccattctataccattgctctctattccattccattccatctgtctccattcctttcgtttcaattcctttccattccattccattacatttgatcccattttattaaattgcattctattcgagtgatttccattcgagtcctttccattcgattccattccattctattccattcctttggattccattccattccgttccgttcacatcaattcctggcgattccattacattcgatttcttgccattcgattccattccttttgactccatttcattcgattccattccattccattaatttccattccattcgagacctttccattgcagtcttttcccttcgagtccattccgttcgattcccttccgttcgattcccttccattcgattccattccattggagtccgtaccagtcgagtccattctattccagtccatt

SEQ ID NO: 45080 - DNA, 2300 bp, Homo sapien
ttggaatggaatggaattcattggaatggaagggaatgtagtgtaatggacaggcctggaataaagtggaatgctacggtctcgaatggaataaaaatgtatggaatggaatgcaatgaaacggaatcgaatgtcatagaatgtaatggaatgcaaaaaaatggaatccaaaatcattgactggaaaggctgggtgtcgaaaggaattgactccaatggaatggaatcgaatggaatggaagtgaatagaatcgaactaaatcgaatggaatggaattgataggaacggaatggaaaggaatgcaatgatttggcatggaatggaatcgaatggcatcgaatggaatggaatggaatgcaatggaatggaatgtattagaatgtaatgaactttaatggaatgtactcgaatggattcgactggaatggaatgttctggaagtgaatggactccaatggaatggattcaaaaggaatggaatcgtacggaatggaatctaatggaatggaattaaatggaaatgaatcaaattgaatagcacggaattgaattgaatggaatggaatgcaatggaatctaatgaaacggaaaggaaaggaatggaatggaatggaatgggctggaatggaaaggaatcgaaacgaatggaatggaatcgaactgaagagactggaatggaatgcactggaatggaagggagtgtaatggaaggttctcgaaaaaaatggaatcgaatggaatggaattgaatggaacggaatagagtcgaatggaattgaatggaatggaatggactagagtgaaatggaatcgaaccacaaggaatggacaggaatagaatggtctcgaattgaatggaatcgtatggaatggcatcaaacggaatggaatggacagccacggaatggaatgcactcgaatgcaatggagtcgaaacaaatggactggaatagaatggactcgactggtacggactccaatggaatggaatcgaatggaagggaatcgaacggaagggaatcgaacggaatggactcgaagggaaaagactgcaatggaaaggtctcgaatggaatggaaattaatggaatggaatggaatcgaatgaaatggagtcaaaaggaatggaatcgaatggcaagaaatcgaatgtaatggaatcgccaggaattgatgtgaacggaacggaatggaatggaatccaaaggaatggaatagaatggaatggaatcgaatggaaaggactcgaatggaaatcactcgaatagaatgcaatttaataaaatgggatcaaatgtaatggaatggaatggaaaggaattgaaacgaaaggaatggagacagatggaatggaatggaatagagagcaatggtatagaatggaatggaatcatctggaatggaattgaatggaatggaataatatgaaatggaatggaatggaatggaatggaatgcccttgaattaaatggactggaatggaatggactcaaacagagtggaatggaaagtgtggagatagaatggaatgaactcctttggaatggtgtagtatgcaatgcaatcgactggcagggaatcaaaaggaatgtaatcgaatggattggactggaatgcaatggactcgaatagattggaaacggaatgcaaaggaatggaatggaatagtatggaatgcaatggaagggaatggagtggaatagactagagtggaatggaatggactggaaagcaatggactggaatggaactttcttggatggactggaatcaaacggaatggaatgcaatgcaatcaaatggcatggaataaattagaatgaaagagaatcaaatggaattgaatcgaatggaatcgaatggattggaaaggaatagaatggaatggaatggaattgactcaaatggaatggactagaatggaatggattcgaatggaaggcaaaggaatggaatctattggaatggactgtaatggaatggaatggaagggattggaatggactcgaatggaatggactgcaatagaaaggattcgaatggaatgaaaaagaattgaatggaatagaacagaatggaatgaaatcgaatgaaatggaatggaatagaaaggaatggaatgaaatggaatggaaaggattcgaatggaatgcaatcgaatggaatggaatcgaacggaatggaataaaatggaagaaaactggcaagaaatggaatcgaaatgaatggagtgttatggaacggactcaaaaggaattgaatgtaatagaatggagtggagtggactcgaatataatg

SEQ ID NO: 45081 - DNA, 2300 bp, Homo sapien
gaatggaatcgaatggcaagaaatcgaatgtaatggaatcgccaggaattgatgtgaacggaacggaatggaatggaatccaaaggaatggaatagaatggaatggaatcgaatggaaaggactcgaatggaaatcactcgaatagaatgcaatttaataaaatgggatcaaatgtaatggaatggaatggaaaggaattgaaacgaaaggaatggagacagatggaatggaatggaatagagagcaatggtatagaatggaatggaatcatctggaatggaattgaatggaatggaataatatgaaatggaatggaatggaatggaatggaatgcccttgaattaaatggactggaatggaatggactcaaacagagtggaatggaaagtgtggagatagaatggaatgaactcctttggaatggtgtagtatgcaatgcaatcgactggcagggaatcaaaaggaatgtaatcgaatggattggactgaaatgcaatggactcgaatagattggaaacggaacgcaaaggaatggaatggaatagtatggaatgcaatggaagggaatggagtggaatagactagagtggaatggaatggactggaaagcaatggactggaatggaacattcttggatggactggaatcaaacggaatggaatgcaatgcaatcaaatggcatggaataaaatagaatgaaagagaatcaaatggaattgaatcgaatggaatcgaatggattggaaaggaatagaatggaatggaatggaattgactcaaatggaatggactagaatggaatggattcgaatggaaggcaaaggaatggaatctattggaatggactgtaatggaatggaatggaagggattggaatggactcgaatggaatggactgcaatagaaaggattcgaatggaatgaaaaagaattgaatggaatagaacagaatggaatcaaatcgaatgaaatggaatggaatagaaaggaatggaatgaaatggaatggaaaggattcgaatggaatgcaatcgaatggaatggaatcgaacggaatggaataaaatggaagaaaactggcaagaaatggaatcgaaatgaatggagtgttatggaacggactcaaaaggaattgaatgtaatagaatggagtggagtggactcgaatataatggactggaatggaatgaaatcacatggaatgggaacgaatggaatggaatggaaaggaatggaatcgaatggaaaggaatcgaatggaagtgaatgaaattgaatcaacacgaatggaagggaatagaatagactgtaatggaatggactcgaatagaatggacacgaatgctcaaattaaatggactcgaatggaatggaaacgaaaggaatgtcatcgaatggaattgaatcaattggaatgaaatcgcatagaatggagtggaatcaaatggaattgaatcgaaaggaaaggaagcgaatggactgaaatgaaatggaatggaattgaatggaaagtaatgcaatggaatagaatggaacgaaatttcacggaatggaatcaaactgaatggaatcaaatcaatggaatcaaatcaaatggaatggaaaggaattgaatggagtagatgggattggatgggattggaatgaaatgtactggaaaggactcgaatttcatgaaacggaatggaatgaattggaacggaatggactcgaatggaatggaatgtcatgggatggcatcaaatggaatggcatcaaatggaatggaatcgaatgcaatggaatgctatggaatggaatggaatgcattggaatggaatgtcctctaatggaatggattcgagtggaatggaattgaatataatggagtcgaatgaaatggaattgaaaggaatgggatcgaatacaatggaatatactggaatgtaacgtaatgaactcgaatgtaattgactggaatggaatgtacatgaatggaatgtaatcgaatggaaagtaatccaatggaatagattctaatgcaataaaatcgactcagatagagtagaatgtaatggaatggagtgcagtgcaatggaatggaatggaatggaatgcaatggaatggaatggaatggaatggaatggaatggaatggaatgggatggaatggtatggaatggatagtaatggactggagtgaaatggactggaaaggaatggactcaaattgaaagggctcgaaaggaatggagtcaaatggaatggtctggaatggaatgaacacgaatgtaatgcaacccaatagaatggaatcg

SEQ ID NO: 45082 - DNA, 2300 bp, Homo sapien
aacggaatggaatgaattggaacggaattgactcgaatggaatggaatgtcatgggatggcatcaaatggaatgacatcaaatggaatggaatcgaatgcaatggaatgctatggaatggaatggaatgcattggaatggaatgtccgctaatggaatggattcgagtggaatggaattgaatataatggagtcgaatgaaatcgaattgaaaggaatgggatcgaatacaatggaatatactggaatgtaacgtaatgaactggaatgtaattgactggaatggaatgtacatgaatggaatgtaatcgaatggaaagtaatccaatggaatagaatctaatgcaataaaatcgactcagatagagtagaatgtaatggaatggagtgcagtgcaatggaatggaatggaatggaatgcaatggaatggaatggaatggaatggaatggaatggaatgggatggaatggtatggaatggatagtaatggactggagtgaaatggactggaaaggaatggactcaaattgaaagggctcgaaaggaatggagtcaaatggaatggtctggaatggaatgaacacgaatgtaatgcaacccaatagaatggaatcgaatggcatggaatataaagaaatggaatcgaagagaatggaaacaaatggaatggaattgaatggaatggaattgaatggaatgggaacgaatggagtgaaattgtatgcagtagaagagaatagaatggaatgcaagcgaaaggaaaggaatggattggaatggaatggaattcattggaatggaagggaatgtagtgtaatggacaggcctggaataaagtggaatgctacggtctcgaatggaataaaaatgtatggaatggaatgcaatgaaacggaatcgaatgtcatagaatgtaatggaatgcaaaaaaatggaatccaaaatcattgactggaaaggctgggtgtcgaaaggaattgactccaatggaatggaatcgaatggaatggaagtgaatagaatcgaactaaatcgaatggaatggaattgataggaacggaatggaaaggaatgcaatgatttggcatggaatggaatcgaatggcatcgaatggaatggaatggaatgcatggaatggaatgtattagaatgtaatgaactttaatggaatgtactcgaatggattcgactggaatggaatgttctggaagtgaatggactccaatggaatggattcaaaaggaatggaatcgtacggaatggaatctaatggaatggaattaaatggaaatgaatcaaattgaatagcacggaattgaattgaatggaatggaatgcaatggaatctaatgaaacggaaaggaaaggaatggaatggaatggaatgggctggaatggaaaggaatcgaaacgaatggaatggaatcgaagtgaagagactggaatggaatgcactggaatggaagggagtgtaatgcaaggttctcgaaaaaaatggaatcgaatggaatggaattgaatggaacggaatagagtcgaatggaattgaatggaatggaatggactagagtgaaatggaatcgaaccacaaggaatggacaggaatagaatggtctcgaattgaatggaatcgtatggaatggcatcaaacggaatggaatggacagccacggaatggaatgcactcgaatgcaatggagtcgaaactaatggactggaatagaatggactcgactggtacggactccaatggaatggaatcgaatggaagggaatcgaacggaatggactcgaagggaaaagactgcaatggaaaggtctcgaatggaatggaaattaatggaaaggaatggaatcgaatgaaatggagtcaaaaggaatggaatcgaatggcaagaaatcgaatgtaatggaatcgccaggaattgatgtgaacggaacggaatggaatggaatccaaaggaatggaatagaatggaatggaatcgaatggaaaggactcgaatggaaatcactcgaatagaatgcaatttaataaaatgggatcaaatgtaatggaatggaatggaaaggaattgaaacgaaaggaatggagacagatggaatggaatggaatagagagcaatggtatagaatggaatggaatcatctggaatggaattgaatggaatggaataatatgaaatggaatggaatggaatggaatggaatgcccttgaattaaatggactggaatggaatggactcaaacagagtggaatggaaagtgtggagatagaatggaatgaactcctttgga

SEQ ID NO: 45083 - DNA, 2300 bp, Homo sapien
attggaatggaatggaattcattggaatggaagggaatgtagtgtaatggacaggcctggaataaagtggaatgctacggtctcgaatggaataaaaatgtatggaatggaatgcaatgaaacggaatcgaatgtcatagaatgtaatggaatgcaaaaaaatggaatccaaaatcattgactggaaaggctgggtgtcgaaaggaattgactccaatggaatggaatcgaatggaatggaagtgaatagaatcgaactaaatcgaatggaatggaattgataggaacggaatggaaaggaatgcaatgatttggcatggaatggaatcgaatggcatcgaatggaatggaatggaatgcatggaatggaatgtattagaatgtaatgaactttaatggaatgtactcgaatggattcgactggaatggaatgttctggaagtgaatggactccaatggaatggattcaaaaggaatggaatcgtacggaatggaatctaatggaatggaattaaatggaaatgaatcaaattgaatagcacggaattgaattgaatggaatggaatgcaatggaatctaatgaaacggaaaggaaaggaatggaatggaatggaatgggctggaatggaaaggaatcgaaacgaatggaatggaatcgaactgaagagactggaatggaatgcactggaatggaagggagtgtaatggaaggttgtcgaaaaaaatggaatcgaatggaatggaattgaatggaacggaatagagtcgaatggaattgaatggaatggaatggactagagtgaaatggaatcgaaccacaaggaatggacaggaatagaatggtctcgaattgaatggaatcgtatggaatggcatcaaacggaatggaatggacagccacggaatggaatgcactcgaatgcaatggagtcgaaactaatggactggaatagaatggactcgactggtacggactccaatggaatggaatcgaatggaagggaatcgaacggaagggaatcgaacagaatggactcgaagggaaaagactgcaatggaaaggtctcgaatggaatggaaattaatggaatggaatggaatcgaatgaaatggagtcaaaaggaatggaatcgaatggcaagaaatctaatgtaatcgaatcgccaggaattgatgtgaacggaacggaatggaatggaatccaaaggaatggaatagaatggaatggaatcgaatggaaaggactcgaatggaaatcactcgaatagaatgcaatttaataaaataggatcaaatgtaatggaatggaatggaaaggaatcgaaacgaaaggaatggagacagatggaatggaatggaacagagagcaatggtatagaatggaatggaatcatctggaatggaattgaatggaatggaacaatatgaaatggaatggaatggaatggaatggaatgcccttgaattaaatggactggaatggaatggactcaaacagagtggaatggaaagtgtggagatagaatggaatgaactcctttggaatggtgtagtatgcaatgcaatcgactggcagggaatcaaaaggaatgtaatcgaatggattggactggaatgcaatggactcgaatagattggaaacggaatgcaaaggaatggaatggaatagtatggaatgcaatggaagggaatggagtggaatagactagagtggaatggaatggactggaaagcaatggactggaatggaactttcttggatggactggaatcaaacggaatggaatgcaatgcaatcaaatggcatggaataaaatagaatgaaagagaatcaaatggaattgaatcgaatggaatcgaatggattggaaaggaatagaatggaatggaatggaatggactcaaatggaatggactagaatggaatggattcgaatggaaggcaaaggaatggaatctattggaatggtctgtaatggaatggaatggaagggattggaatggactcgaatggaatggactgcaatagaaaggattcgaatggaatgaaaaagaattgaatggaatagaacagaatggaatcaaatcgaatgaaatggaatggaatagaaaggaatggaatgaaatggaatggaaaggattcgaatggaatgcaatcgaatggaatggaatcgaacggaatggaataaaatggaagaaaactggcaagaaatggaatcgaaatgaatggagtgttatggaacggactcaaaaggaattgaatgtaatagaattgagtggagtggactcgaatataatg

SEQ ID NO: 45084 - DNA, 2300 bp, Homo sapien
tcctttccattcgattccattccattctattccattcctttggattccattccattccgttccgttcacatcaattcctggcgattcgattacattagatttcttgccattcgattccattccttttgactccatttcattcgattccattccattccattaatttccattccattcgagacctttccattgcagtcttttcccttcgagtccattctgttcgattcccttccgttcgattcccttccattcgattccattccattggagtccgtaccagtcgagtccattctattccagtccattagtttcgactccattgcattcgagtgcattccattccgtggctgtccattccattccgtttgatgccattccatacgattccattcaattcgagaccattctattcctgtccattccttgtggttcgattccatttcactctagtccattccattccattcaattccattcgactctattccgttccattcaattccattccattcgattccatttttttcgacaaccttccattacactcccttccattccagtgcattccattccagtctcttcagttcgattccattccattcgtttcgattcctttccattccagcccattccattccattccattcctttcctttccgtttcattagattccattgcattccattccattcaattcaattccgtgctattcaatttgattcatttccatttaattccattccattagattccattccgtacgattccattccttttgaatccattccattggagtccattcacttccagaacattccattccagtcgaatccattcgagtacattccattaaagttcattacattctaatacattccattccatgcattccattccattccattcgatgccattcgattccattccatgccaaatcattgcattcctttccattccgttcctatcaattccattccattcgatttagttcgattctattcacttccattccattcgattccattccattggagtcaattcctttcgacacccagcctttccagtcaatgattttggattccatttttttgcattccattacattctatgacattcgattccgtttcattgcattccattccatacatttttattccattcgagaccgtagcattccactttattccaggcctgtccattacactacattcccttccattccaatgaattccattccattccaatccattcctttcctttcgcttgcattccattctattctcttctactgcatacaatttcactccattcgttcccattccattcaattccattccattcaattccattccatttgtttccattctcttcgattccatttctttatattccatgccattcgattccattctattgggttgcattacattcgtgttcattccattccagaccattccatttgactccattcctttcgagccctttcaatttgagtccattcctttccagtccatttcactccagtccattactatccattccataccattccatcccattccattccattccattccattccattccattccattccattccattgcattccattccattccattcctttgcactgcactccattccattacattctactctatctgagtcgattttattgcattagattctattccattggattactttccattcgattacattccattcatgtacattccattccagtcaattacattcgagttcattacattacattccagtatattccattgtattcgatcccattcctttcaattccatttcattcgactccattatattcaattccattccactcgaatccattccattagaggacattccattccaatgcattccattccattccatagcattccattgcattcgattccattccatttgatgccattccatttgatgccatcccatgacattccattccattcgagtccattccattcgattccattccattctattccattcctttggattccattccattccgttccgttcacatcaattcctggcgattccattacattcgatttcttgccattcgattccattccttttgactccatttcattcgattccattccattccattaatttccattccattcgagacctttccattgcagtcttttcccttcgagtccattccgttcgattcccttccgttcgattcccttccattcgattccattccattggagtccgtaccagtcgagtccattctattccagtccatt

SEQ ID NO: 45085 - DNA, 2300 bp, Homo sapien
tgaatggaatgtaatcgaatggaaagtaatccaatggaatagaatctaatgcaataaaatcgactcagatagagtagaatgtaatggaatggagtgcagtgcaatggaatggaatggaatggaatgcaatggaatggaatggaatggaatgggatggaatggtatggaatggatagtaatagactggagtgaaatggactggaaaggaatggactcaaattgaaagggctcgaaaggaatggagtcaaatggaatggtctggaatggaatgaacacgaatgtaatgcaacccaatagaatggaatcgaatggcatggaatataaagaaatggaatcgaagagaatggaaacaaatggaatggaattgaatggaatggaattgaatggaatgggaacgaatggagtgaaattgtatgcagtagaagagaatagaatggaatgcaagcgaaaggaaaggaatggattggaatggaatggaattcattggaatggaagggaatgtagtgtaatggacaggcctggaataaagtggaatgctacggtctcgaatggaataaaaatgtatggaatggaatgcaatgaaacggaatcgaatgtcatagaatgtaatggaatgcaaaaaaatggaatccaaaatcattgactggaaaggctgggtgtcgaaaggaattgactccaatggaatggaatcgaatggaatggaagtgaatagaatcgaactaaatcgaatggaatggaattgataggaacggaatggaaaagaatgcaatgatttggcatggaatggaatcgaatggcatcgaatggaatggaatggaatgcaatggaatggaatgtattagaatggaatgaactttaatggaatgtactcgaatggattcgactggaatggaatgttctggaagtgaatggactccaatggaatggattcaaaaggaatggaatcgtacggaatggaatctaatggaatggaattaaatggaaatgaatcaaattgaatagcacggaattgaattgaatggaatcgaatgcaatggaatctaatgaaacggaaaggaaaggaatggaatggaatggaatgggctggaatggaaaggaatcgaaacgaatggaatggaatcgaagtgaagagactggaatggaatgcactggaatggaagggagtgtaatggaaggttctcgaaaaaaatggaatcgaatggaatggaattgaatggaacggaatagagtcgaatggaattgaatggaatggaatggactagagtgaaatggaatcgaaccacaaggaatggacaggaatagaatggtctcgaattgaatggaatcgtatggaatggcatcaaacggaatggaatggacagccacggaatggaatgcactcgaatgcaatggagtcgaaacaaatggactggaatagaatggactcgactggtacggactccaatggaatggaatcgaatggaagggaatcgaacggaagggaatcgaacggaatggactcgaagggaaaagactgcaatggaaaggtctcgaatggaatggaaattaatggaatggaatggaatcgaatgaaatggagtcaaaaggaatggaatcgaatggcaagaaatcgaatgtaatggaatcgccaggaattgatgtgaacggaacggaatggaatggaatccaaaggaatggaatagaatggaatggaatcgaatggaatggactcgaatggaatggaatgtcatgggatggcatcaaatggaatggcatcaaatggaatggaatcgaatgcaatggaatgctatggaatggaatggaatgcattggaatggaatgtcctctaatggaatggattcgagtggaatggaattgaatataatggagtcgaatgaaatggaattgaaaggaatgggatcgaatacaatggaatatactggaatgtaatgtaatgaactcgaatgtaattgactggaatggaatgtacatgaatggaatgtaatcgaatggaaagtaatccaatggaatagaatctaatgcaataaaatcgactcagatagagtagaatgtaatggaatggagtgcagtgcaaaggaatggaatggaatggaatgcaatggaatggaatggaatggaatggaatggaatggaatggaatggaatgggatggaatggtatggaatggatagtaatggactggagtgaaatggactggaaaggaatggactcaaattgaaagggctcgaaaggaatggagtcaaatggaatggtctggaatggaatgaacacgaatgtaatgcaacccaatagaatggaat

SEQ ID NO: 45086 - DNA, 2300 bp, Homo sapien
tcccactactgggcatgtactcggtgtgtgtgtgtgtacatatatatatatatatatatatatggttccattgcattcgattccattacattagactccattccattcaagttcattccattcgagtccattcgattccagtgaattgcattcgagtccattacatttgattccattccgttccattccattatattcgattccattccattccaatccattccattcgatttcattccattcaattgcattccattagattgcattccattcgattgcattccattcgagttcattccattcgagttccttccattcgagttcattccattcgagttcattccattccagtccaatccattcgagtccattccattccagtcctgtattcgattccattccattccattccactcgattccattccactcgattccattccactcgattccattccatttgattctattccattccattccattgcattcaattctattccattccattcgattcctttctttttgggttcattccattctagtccactccattccagtccactccaatcaaatccatttcattccattccagaagattccattccattcaagtccattccagtcgcttccaatccattccattcaagaagattccattccattcaagtccattccagtcgattccattccattccattgcattccattcgattgtattccattccattccattagaatagattccattccattctattccattccattcgattcatttcctttcgagtccattccattcgagtccattccaatcaagtccatttcattccagtccattccattcgattcccttccattcgattctattccattcgattctattccattcgattctattccattcaattctattccattcgattccatcccgtttgattgcattccattcgattgcattccattcgagtccatccaattgaatccattccatttgcatccattcaattcgaatccattccattcgtgtccattccattccattccattccctttgagtccattccattcgattccattccattccagtccattccattcggttccattccattcctttccattccattcgattccattccattcgattccattccattcaattccattccattcgagactgtactattacactccattcgattccattccattcgattacattccattcgattccattccattgcattccattccattccattagtttccattccattcaattccattcctttcgtttcaaatcccttccattcaattccattccattcaattccatttcattcgattccattcctttcgagtccattccattcaagtccatatcattccaatccattccctttgagtccattccattccagtccattccactacagtccattccatccaattccattccattggattacattccattcgaatgcataccattcgattacattccattcgagtccattgaattacactccattccattccataccattccattccattcgattgcattccattcaagttcatttcattgaattccattccattccggtcgattacattcgagtacaatccactctattccattccataccattccattccattcgaggcgattcctttcaagtccattgcattgcagtccgttccatttgattccatcccatttgattccatcccattcgagtccattccattcaagtctgttccattcgagtccgttccattcgagtccgtaccattctattccattgctttcctttcctttcctttcctttccattccattcctttccattccattccatgcgagtccattccatgcgagtcctttccattccagtccattccattcaatttcgattgcattccattccattctaatccgttccatccgattgcatgccatccgattgcatgccatccgatttgattccattctgttctattccattccatttgattcctcttcctttcgagtccattccattctagtccattccattccagtccattccattcgagtccattccattccattctagtccattccattccattagattccagtgcattttatgccattccactcgattccattccattccattccattccagtccattcgattccattccattcaaatcaattccattccaatccattccattccattctattccattccattaaatttgaatccattccattccattccagtccattcctttcaagtccattcaat

SEQ ID NO: 45087 - DNA, 2300 bp, Homo sapien; identical to SEQ ID NO: 44845

SEQ ID NO: 45088 - DNA, 2300 bp, Homo sapien; identical to SEQ ID NO: 44847

SEQ ID NO: 45089 - DNA, 2300 bp, Homo sapien; identical to SEQ ID NO: 44848

SEQ ID NO: 45090 - DNA, 2300 bp, Homo sapien; identical to SEQ ID NO: 44849

SEQ ID NO: 45091 - DNA, 2300 bp, Homo sapien; identical to SEQ ID NO: 44850

SEQ ID NO: 45092 - DNA, 2300 bp, Homo sapien; identical to SEQ ID NO: 44851

SEQ ID NO: 45093 - DNA, 2300 bp, Homo sapien; identical to SEQ ID NO: 44852

SEQ ID NO: 45094 - DNA, 2300 bp, Homo sapien; identical to SEQ ID NO: 44853

SEQ ID NO: 45095 - DNA, 2300 bp, Homo sapien; identical to SEQ ID NO: 44854

SEQ ID NO: 45096 - DNA, 1986 bp, Homo sapien; identical to SEQ ID NO: 44855

SEQ ID NO: 45097 - DNA, 872 bp, Homo sapien
cggtaccctcagccggcccgcccgcccgggtctgacctgaggagaactgtgctccgccttcagagtaccaccgaaatctgtgcagaggacaacgcagctccgccctcgcggtgctctccgggtctgtgctgaggagaacgcaactccgccggcgcaggcgcagagaggcgcgccgcgccggcgcaggcgcagacacatgctagcgcgtcggggtggaggcgtggcgcaggcgcagagaggcgcgccgcgccggcgcaggcgcagagacacatgctaccgcgtccaggggtggaggcgtggcgcaggcgcagagaggcgcaccgcgccggcgcaggcgcagagacacatgctagcgcgtccaggggtggaggcgtggcgcaggcgcagagacgcaagcctacgggcgggggttgggggggcgtgtgttgcaggagcaaagtcgcacggcgccgggctggggcggggggagggtggcgccgtgcacgcgcagaaactcacgtcacggtggcgcggcgcagagacgggtagaacctcagtaatccgaaaagccgggatcgaccgccccttgcttgcagccgggcactacaggacccgcttgctcacggtgctgtgccagggcgccccctgctggcgactagggcaactgcagggctctcttgcttagagtggtggccagcgccccctgctggcgccggggcactgcagggccctcttgcttactgtatagtggtggcacgccgcctgctggcagctagggacattgcagggtcctcttgctcaaggtgtagtggcagcacgcccacctgctggcagctggggacactgccgggccctcttgctccaacagtactggcggattatagggaaacacc

SEQ ID NO: 45098 - DNA, 1053 bp, Homo sapien
cgcggtttatactttcgaagtgctcggagcccttcctccagaccgttctcccacaccccgctccagggtctctcccggagttacaagcctcgctgtaggccccgggaacccaacgcggtgtcagagaagtggggtcccctacgagggaccaggagctccgggcgggcagcagctgcggaagagccgcgcgaggcttcccagaacccggcaggggcgggaagacgcaggagtggggaggcggaaccgggaccccgcagagcccgggtccctgcgccccacaagccttggcttccctgctagggccgggcaaggccgggtgcagggcgcggctccagggaggaagctccggggcgagcccaagacgcctcccgggcggtcggggcccagcggcggcgttcgcagtggagccgggcaccgggcagcggccgcggaacaccagcttggcgcaggcttctcggtcaggaacggtcccgggcctcccgcccgcctccctccagcccctccgggtcccctacttcgccccgccaggcccccacgaccctacttcccgcggccccggacgcctcctcacctgcgagccgccctcccggaagctcccgccgccgcttccgctctgccggagccgctgggtcctagccccgccgcccccagtccgcccgcgcctccgggtcctaacgccgccgctcgccctccactgcgccctccccgagcgcggctccaggaccccgtcgacccggagcgctgtcctgtcgggccgagtcgcgggcctgggcacggaactcacgctcactccgagctcccgacgtgcacacggctcccatgcgttgtcttccgagcgtcaggccgcccctacccgtgctttctgctctgcagaccctcttcctagacctccgtcctttgtcccatcgctgccttcccctcaagctcagggccaagctgtccgccaacctcggctcctccgggcagccctcgcccggggtgcgccccggggcaggacccccagcccacgcccagggcccgcccctgccctccagccctacgccttgacccgct

SEQ ID NO: 45099 - DNA, 989 bp, Homo sapien
cgcgtgggaggggccggtgtgaggcaagggctcacactgacctctctcagcgtgggaggggccggtgtgaggcaaggggctcacgctgacctctgtccgcgtgggaggggccggtgtgaggcaagggctcacactgacctctctcagcgtgggaggggccggtgtgaggcaaggggctcacgctgacctctgtccgcgtgggaggggctggtgtgaggcaagggctcaggctgacctctctcagcgtgggaggggccggtgtgaggcaaggggctcacgctgacctctgtccgcgtgggaggggccggtgtgagacaaggggctcacactgacctctctcagcgtgggaggggccggtgtgaggcaaggggctcaggctgacctctgtccgcgtgggaggggccggtgtgaggcaaggggctcaggctgacctctgtccgcgtgggaggggccggtgtgaggcaaggggctcaggctgacctctgtccgcgtgggaggggccggggtgaggcaagggctcacactgacctctctcagcgtgggaggggccggtgtgaggcaaggggctcgggctgacctctctcagcgtgggaggggccggtgtgaggcaaggggctcgggctgacctctctcagcgtgggaggggccggtgtgaggcaaggggctcgggctgacctctgtccgcgtgggaggggccggtgtgaggcaaggggctcgggctgacctctctcagcgtgggaggggccggtgtgaggcaaggggctcacgctgacctctgtccgcgtgggaggggccggtgtgaggcaagggctcacactgacctctctcagcgtgggaggggccggtgtgagacaaggggctcacgctgacctctgtccacgtgggaggggccggtgtgaggcaaggggctcacactgacctctctcagcgtgggaggggccggtgtgaggcaaggggctcacgctgacctctgtccgcgtgggaggggc

SEQ ID NO: 45100 - DNA, 857 bp, Homo sapien
cgggggaggtggcgggctgggtgtgcagagtgggcctgagctccggcctcctccctggacgccctcccgtggccgcagccatccccgcacccactggtgtggcctgacccttcaccctgagcccacccttcgcggccactagggaacctcaggagaggccgccgcggtggggtgggcggattcccccggagcaggcccaggcccctgctcctgagctctcctgcagcgccgtctgctggccacagagaacccacgtgcgccggccgccaggcctgggcatctcctctcctgcagcgccgcctgctggccacagagaacccgcgtgcgccggccgccaggcctgggcatctcctctcctgcagcgccgcctgctggccacagagaacccgcgtgcgccggccgcctggcctgggcatctcctctcctgcagcgccgcctgctggccacagagaacccgcgtgcgccggccgcctggcctgggcatctcctctcctgcagcgccgcctgctggccacagagaacccgcgtgtgccggccgccaggcctgggcatctcctctcctgcagcgccgcctgctggccacagagaacccgcgtgcgccggccgcctggcctgggcatctcctctcctgcagcgccgcctgctggccacagagaacccacgtgcgccggccgcctggcctgggcatctcctctcctgcagcgccgcctgctggccacagagaacccgcgtgcgccggccgccaggcctgggcatctccccgggccctagttccccccctcacctaaggggagggactcccgtctttccatccaccccctccttgcctctgcagagctccagggaaggctggcacc

SEQ ID NO: 45101 - DNA, 1169 bp, Homo sapien
cgtgtagaaactgcgacactcacacgggtgccatctcagcagctcacggtgtggaaactgcgacactcacgcgggtgccatctcagcagctcacggtgtggaaactgcgacactcacgcgggtgccgtctcagcagctcacggtgtggaaactgcgacactcacgcgggtgccgtctcagcagctcacggtgtggaaactgcgacactcacgcgggtgccgtctcagcagctcacggtgtggaaactgcgacactcacgcgggtgccgtctcagcagctcacggtgtggaaactgcgacactcacgcgggtgccgtctcagcagctcacggtgtggaaactgcgacactcacgcgggtgccgtctcagcagctcacggtgtggaaactgcgacactcacgcgggtgccgtctcagcagctcacggtgtggaaactgcgacactcacgcgggtgccgtctcagcagctcacggtgtggaaactgcgacactcacgcgggtgccgtctcagcagctcacggtgtggaaactgcgacactcacgcgggtgccgtctcagcagctcacggtgtggaaactgcgacactcacgcgggtgccgtctcagcagctcacggtgtggaaactgcgacactcacgcgggtgccgtctcagcagctcacggtgtggaaactgcgacactcacgcgggtgccgtctcagcagctcacggtgtggaaactgcgacactcacgcgggtgccgtctcagcagctcacggtgtggaaactgcgacactcacgcgggtgccgtctcagcagctcacggtgtggaaactgcgacactcacacgggtgccgtctcagcagctcacggtgtggaaactgcgacactcacgcgggtgccgtctcagcagctcacggtgtggaaactgcgacactcacgcgggtgccgtctcagcagctcacgtccaggaccccaggctgcactggccctcacgcctccttagtcccctgcacctgtgaccctttcctggcctgtcttcgcttcaccgccttgacagctttgcagagtgctgctcaggtattctgcaagacgcccctcaattggtgtgtgtgtgatgttctctctgattacattggaactgtgcgtttgcggaagaacacggcgggggggggggcggcgctcttctcatca

SEQ ID NO: 45102 - DNA, 1792 bp, Homo sapien
cgctgaagccttgtaccctgacccactgtctgaacctgatggagtctaaatgcagtgagcgggtgccagccttccctggagctctgcagaggcaaggagggggtggatggaaagacgggagtccctccccttaggtgagggggggaactagggcccggggagatgcccaggcctggcggccggcacacgcgggttctctgtggccagcaggcggcgctgcaggagaggagatgcccaggcctggcggccggcgcacgcgggttctctgtggccagcaggcggcgctgcaggagaggagatgcccaggccaggcggccggcgcacgcgggttctctgtggccagcaggcggcgctgcaggagaggagatgcccaggcctggcggccggcgcacgcgggttctctgtggccagcaggcggcgctgcaggagaggagatgcccaggcctggcggcacacgcgggttctctgtggccagcaggcggcgctgcaggagaggagatgcccaggcctggcggccggcgcacgcgggttctctgtggccagcaggcggcgctgcaggagaggagatgcccaggcctggcggccggcgcacgcgggttctctgtggccagcaggcggcgctgcaggagaggagatgcccaggcctggcggccggcgcacgcgggttctctgtggccagcaggcggcgctgcaggagaggagatgcccaggccaggcggccggcgcacgcgggttctctgtggccagcaggcggtgctgcaggagaggagatgcccaggcctggcggccggcgcacgcgggttctctgtggccagcaggcggcgctgcaggagaggagatgcccaggcctggcggccggcgcacgcgggttctctgtggccagcaggcggcgctgcaggagaggagatgcccaggcctggcggcacacgcgggttctctgtggccagcaggcggcgctgcaggagaggagatgcccaggcctggcggccggcgcacgcgggttctctgtggccagcaggcggcgctgcaggagaggagatgcccaggcctggcggccggcgcacgcgggttctctgtggccagcaggcggcgctgcaggagaggagatgcccaggcctggcggccggcgcacgcgggttctctgtggccagcaggcggcgctgcaggagaggagatgcccaggccaggcggccggcgcacgcgggttctctgtggccagcaggcggtgctgcaggagaggagatgcccaggcctggcggccggcgcacgcgggttctctgtggccagcaggcggcgctgcaggagaggagatgcccaggccaggcggccggcgcacgcgggttctctgtggccagcaggcggtgctgcaggagaggagatgcccaggcctggcggccggcgcacgcgggttctctgtggccagcaggcggcgctgcaggagaggagatgcccaggcctggcggccggcgcacgcgggttctctgtggccagcaggcggcgctgcaggaggggagatgcccaggcctggcggccggcgcacgtgggctctctgtggccagcaggcggcgctgcaggagagctcaggagcaggggcctgggcctgctccgggggaatccgcccaccccaccgcggcggcctctcctgaggttccctagtggccgcgaagggtgggctcagggtgaggggtcaggccacaccagtgggtgcggggatggctgcggccacgggagggcgtccagggaggaggccggagctcaggcccactctgcacacccagcccgccacctcccc

SEQ ID NO: 45103 - DNA, 887 bp, Homo sapien
ccatgttgctaggctgctcttggcctgaagggtcctcccgcctcggccgcgccagacatagttttctatttttgaccaacataaacactgtgctgggtctgaatttttcagctacccttcttcagccggcaacacacagaacctggcggggaggtcactcttaccagtccccactctgatgagaaaactgcccagctccaggcaccatggcgccccagtgatgtagccgaacacccgcgcctctaacgtcgccaacggcccacctctatggtgtcggcgaagacccgcccttgtgacgtcacggaaggcgcacccttgtgacgtcacaggggactaccactcacgcagagccaatcagaactcgcggtgggggctgctggttcttccaggagcgcgcatgagcggacgctgcctactggtggccgggcgggatgtaaccggctgctgagctggcagttctgtgtcgctaggcttctgcccggccgccgccgcacataagccacgaggaggagctttacgacttcccggtcttcggcgccgggcgcagcaagggccagactctgcgctagcaggcgctgcgcgccaaccggccggcacctgtcgcagaaggtgcaaccgatcgcactgtcgcgcagaagctcctcaatggccagcgccagctgcagccccggccgcccactcgcctcatctgagcctgggtacgtgcgctccacaacgcctcccccagccagggcccggggatccccgggagcgtccccggctacctggcgccgctcatcctgggtagggtcggccccctgaggctgcccggcatgagggagttgcacccctgagcttgacctctgacggtcctttgtaatagcattaagtctttgaaacttgtagcg

SEQ ID NO: 45104 - DNA, 890 bp, Homo sapien
cgcgcgcgataggatgggcggacggtgaagagaactagggtggaagggccggacaggggcgacctcagtgacggaaccggacacagacgcagatctggcagctgagcgacaggcttcggagcatttccgggcgtcgcgggactccccgccgacaggagggcggttgccgagcctgtgacatccgcggagaccagcagaccccgggtgtggaggacgccgcagggaggggactgcgtggctgggtttggccacaaaaagcggagggcactcacccgagcggaccttggctccggataatccgtttccgggtcaacaaaaaacgtcgcgcgaggggcggggcgcgtacgtgcagggaggggaggcagagaaaaaggcggggccgggccgggccggggcggggtctcgggcaggggcggggagcttaccgacctcccgcccccgctgcgcgcgtttctggccctgccagtgtctccgccggttgaaagcgcgtgtctgcgtcgggttctgttggagtgcgttcggtgcgccgtgggtccgcgctgcttccacccaacttcctgttaggtaagaggcgcgtgaggctcctgtgccgggggcggtgctgctcccgagtcggcgcgcggcggggacgcgagtccgtaggtgctggcgggagcgagagtcgggtggggaccctcgcgagcccgcactccgcctctgggtagcagcctcttcggccccacacggcgtgacgcgcgctcgggctccgcgttcgcgtcgaggcagaggcgtagtaggggtcgggcccagggctggaggggccgggaccgggcggggtgccgccctggacaccgcgccggcagctgttccgcgcgggttcatgtcattcctattttcaacctgtcctgctc

SEQ ID NO: 45105 - DNA, 417 bp, Homo sapien
cgctgctgggccacgcccactcccccacgcggggaaggagcttcgcgctgccgcctggctggggactgggcacgccctcccgcggctccggagccggctgccaccagggggcgcgcccgcggtgtccgggagcctggcggcgcctgtgcagcggccagtgcacctgctcctgccctcgcctcggtctctgccaggaccccgacgcccagccggaccctgccctccagcggggccgcggctccacggcccgcaacagcagccccacccggcattcggcgcgctccgcggggcagaggtcgcggtgtcctcaggctgtggcgccggcctacaacccccacgccgggcccgggccccgtgattatatttgggccccgtgtgattatatttgacaggtcttagttgacgcgctgttcagcg

SEQ ID NO: 45106 - DNA, 2390 bp, Homo sapien
cagcggtgcaaggagagccacatttacccctggcgctgcacggccctgaggctgggcaaggctgtccaccccgctgtcagaaccccagcagggaaggtgtccagaaggcagtcctgggaaccctgcacagaggcccagcgggcacaaggttggggcagctctgttcccagcaggccgagcccgggtggctggagagggagctctggaaggtcagcctaggggccgtcggcccctgcagaccctgtgcccagcccagcatcccggggagctccctccacatgctcatctcacgaggttcctgctgcactcagagtggaggatgggaggcctggggcggagggccggggctttggaatggctgagggggacaaggatgcacaaggggccagtgcagaggacagcgcgactcccaggggcccggggtcctggtcttcctggtcctgccgtttttattagaagcgagccctccaccccagtgggtgtagagcccaggacgcagcagagggtgggggggtggggggcggcatcggggcaggtggcaaccccttggacgcaggctcaggacgccagggtcagggcgtgagtgccggggccccctcaaagccgcggggtccaaagaggccgccggccccggccccgccctctgctcctcctccccctccaccgccaggcccgggtggccgccgcctcctccgaacgcggccgcctcctcctccgaacgtggcctcctccgaacgcggccgcctcctcctccgaacgcggccgcctcctcctccgaacgtggcctcctccgaacgtggccgcctcctcctccgaacgtggcctcctccgaacgcggccgccgcctcctccgaacgcggcctcctcctcctccgaacgcggccgcctcctcctccgaacgtggccgcctccgaacgtggccgccgcctcctccgaacgtggccgcttccgcagcgcccggcgcaggccgcactccgccaccagggggcgccacagctcctcgcgccgccgcctcccgcaaacacaaagagccgcgcggccacgacggccgcgtgcccggagcgccggggtctttcctgggctccaaagtcaagagctcacgttccgggaggatctgtccgcggaaattcggttctgagcgtcgccggactccgccgcggggaggcgggtgaggggagggggccggagggtcgggggtgccggggggtgcgggaaggctgcgggggaggctgttggggacgttcgtggcgggggaggctgttggggacgttcgtggcgggggaggctgttggggacgttcgtggcgggggaggctgttgggtcccctccccgccccaccgcgtcccagggaaccccggcagggcacccagtgaggggggcccgggcgtccgcccattcctcactgctgtccccgcctgtgcccgaaacccccgttcacgttcaccgagaaaacagacataaacccagccaggcacatccactagaatggctgtgatttcagaaaagcggacgtaagtgctgccgaggagatggaggcgttggaccccctcgcgcattgtcggggcgggtgcagccgcggtgcaaaaggaccttcctcagaaagttgagcacgaagttcccacaggcccggaagttcccctcccgggcgctccccagagagctgaagactgggcgcgtgccggcggcaaatgttcacagcaaagggcggcccagtgcgcagctggaacatcagccccaggcggtcgctgcgacagggacgagcctgggaaacgtgaaaatgtccagaacagggaatccacagataaagaaaagacatcgtggttgccagagctcgcgggagggggcaacagggaccgactgcttaacgtgtatggttccccttcagggtgaggacgtgttctgggacgaggtcgaggtcagggttgcaggacaagatgaaagcgctaaatgccactgaattgtttgctttaacgtcattaattttgttatgtgaatttcatctcaatagaataaataggtcaagctggctgcagggcccaccccaccgcggcctggagcagggtcttctggggtgtaccacctctgccctcacccaggctccaccacgaccagcttcgtccaccccccaggagaccatgaaggcccacgtctgaaatcctcactaagcccaccctcccatctccctgaactacgggtaggacccctctggcccccagccctgcccttgacccggcccaccaagcccccacccagatccacaccaccaggcactcttgcccttggcctgctgccaggctggccccgctccttctgggcctcctggagcttcaacccctgcctccacagcagaccttggcctttagcatgttcagtctcctcagtggcagccc

SEQ ID NO: 45107 - DNA, 1656 bp, Homo sapien
cgggtcaggccccccgggcgcaccgttgctggtatatgcggtgatcggggtcaggcccccgggcgcacctttgctggtatatgcgggggtcggggtcaggcccccgggcgcaccgttgctggtatatgcgggggtcggggtcaggcccccgggcgcaccgttgctggtatatgcggtggtcggggtcaggccccccgggcgcactgttgctggtatatgcggtggtcggggtcaggcccccgggcgcacctttgctggtatatgcgggggtcggggtcaggcccccgggcgcaccgttgctggtatatgcgggggtcggggtcaggcccccgggcgttgctggtatatgcgggggtcggggtcaggcccccgggcgcaccgttgctggtatatgcggtggtcggggtcaggcccccgggcgcaccgttgctggtatatgcgggggtcggggtcaggcccccgggcgcaccgttgctggtatatgcggtggtcggggtcaggcccccgggcgcatctttgctggtatatgcggtggtcggggtcaggccccccgggcgcactgttgctggtatatgcggtggtcggggtcaggcccccgggcgcacctttgctggtatatgcgggggtcggggtcaggcccccgggcgcaccgttgctggtatatgcgggggtcggggtcaggcccccgggcgttgctggtatatgcggtggtcggggtcaggcccccgggcgcaccgttgctggtatatgcgggggtcggggtcaggcccccgggcgcaccgttgctggtatatgcggtggtcggggtcaggcccccgggcgcaccgttgctggtatatgcgggggtcggggtcaggcccccgggcgttgctggtatatgcgggggtcggggtcaggcccccgggcgcaccgttgctggtatatgcgggggttggggtcaggccccccgggcgcaccgttgctggtatatgcgggggtcgtttgtggtgtcatcactgctatcttccaggccgggaggaaggaccgagggtgggcccggcgcgggtgggggtcctgggcaggggcggcggcgcggccgggctggtcctggcgctgggacccgcagctgcgccctctgcctgagcagagaccggggcccccacgctccgcgccagcacccggccgcgccgcggagagggaagggttacggcggggatgggggtgggggggttggcgggggcgcgactgacgggctcgggattggctcggcgcgcgcgggacccgggggcagctgcgggcccagacttcccggacgccctggcgcctctgctgcccacggcggccccgaggccgcgcccgcggagaggggggcccccatctcctgtcagccgcagtgactgcgggtgcctgacggcgccgccagcccggggggcccctcccggccccagcggggtctcccggggctgcctctgtcggtcccgacctgcctggtccctggagctggggtgggagtcgtgctttgatcagtcaccgggggcggggagactggtcgaccacccctgagggcccgggacttgtttgccacacctggggagtttcgcggcggcatctggaggggtcctggttgagcagctaggggggtgtctggtaaccagccgggcccctcaggctccctcc

SEQ ID NO: 45108 - DNA, 2769 bp, Homo sapien
cggacaccaacgcccaccatcagattcgctgcgcaaagtcccagagccgccggcgcacgctcacaccccggcgagcagcccccagctccctccctccgagaggagcccggtccgcgaccagcccagcccatcccagtcccgcgcggagtcctggattccagccgctcgcagtgactcggtactcgggatagtgccgggggccgcagccctgtcccgctgccgccgccggatgccccgagtcggccgtcacgcaccccccgcgggagcccgcgccgcccgccgcgccggggccgtttaaatgggccaagttgtggcggcggcgtcggcggcggagtctcccaagtccccgccgggcgggcgcgcgccagtggacgcgggtgcacgactgacgcggcccgggcggcggggcgggggcttgggacccccgagaggggcggggactccgcgactcctcgctgccgggctcggcctggcgggtgggtcggcgagccgggcgtgggactgccccgggcgcgggcgctggtggccggggcgcgggactccagacgccccggggagccccgaggccctggaactgcggcgctcggcgagtcgatccgggatcgatagcagctccatgtctccggcctctgaggccccgccggccggctgggcagtccggggaggcctggcgggcggcgcgtaggcggcggctgcgggcgccggggcgcactagcggacggcgtgggcgcgcggccaggcgcctccccggcccccgcgacccaactccagcccgggccggaataagttgctgccgccggcggagagcggggctgcggagccaccggggcgccatgccggcggtcaagaaggagttcccgggccgcgaggacctggccctggctctggccacgttccacccgaccctggccgcgctgccgctgccgccgctgccaggctacctggcgccactgcccgcggcggccgccctccccccggccgcctcgctgcccgcctcggccgccggttacgaggctctgctggccccgccgctccgccccccgcgcgcctacctcagcctgcacgaggccgccccgcacctccacctgcccagggacccgctggccctcgagcgcttctcggccaccgcggccgcggccccggatttccagccgctgctggacaacggcgagccgtgcatcgaggtggagtgcggcgccaaccgcgcgctgctctacgtgcgcaaactctgccagggcagcaagggcccgtccatccgccaccgcggcgagtggctcacgcccaacgagttccagttcgtcagcggccgcgagacggccaaggactggaagcgcagcatccgccacaaaggtgccgccgcccctcccttcgctgccgggacccgcgggccccgaccccaccccctacccgactcggacacccgggagcctccggctcggccgagggggcgctgcagctccagggctgcgcggggacacccccgccgcgcgcggaggcctcggtgaacacggacagatcgccccccgctgcacctccccccagcttgggccacagcgcttggggctcgcgggccgctccctccgctcggaaggtctctgcgaggctcctgggccttaaggcccgaaggaagtttacggggactcgagagagcgggcaggaggcgggttgggagggcgcggagccccgggttcgggggagactggaggggcgcacgtgcggccgggtgcgagcgcgcggcgggggaggctgcggggcggcgcgggggcgcgcgcggagcccgagcggcggcgccaggtcacacaacctgttttggcgcctgcgggcgcctgggcccaagggtgcgacgcgggggcgcctgagccgggacacagggggtgcggtgagcgccaggcgccgcggggagttaaaaagttcgggacctgagcggtgcgtggttccgcggtggccgcctcttcctgccgcgcaggccgagggtcccgacggcgccgctcaccgctccgggactcagcctttctgggcccggcctgcggttccctcggggccggggagagggtggagcgcgggaggaggggcgccgggtggggacgcccaggcccttcgtcgggggagggcgctccacccgggctggagttgcagagcccagcagatccctgcggcgttcgcgagggtgggacgggaagcgggctgggaagtcgggccgaggtgggtgtggggttcggggtgtatttcgtccacgagccggggagggggtactggccctgccgctgactgcgcgcagaagcgtgccgctccctcacagggtctgcctcggctctgctcgcagggaaaagtctgaagacgcttatgtccaaggggatcctgcaggtgcatcctccgatctgcgactgcccgggctgccgaatatcctccccggtggtgagatgcggggctcggttggggctgggagttactctcccctgcggagcttgtccctgcggttttcagggttttcaggatcgagagtcctaacctcacccctgcgggtgtgctggagggagcctccgaagggcagggggaagcggctttacctcgtgctctcccagcccttctacctggacgggggaggagtcctcgggcacccgagcgccctccccggtggagacaggggggccgcgcttgtcttagagcctccccttgggtgccttttagctgcttatcctcgagtcctgggtcagggtcttctccctgggaggagtaattcaacgtgggcctggcactgtgccctgtcac

SEQ ID NO: 45109 - DNA, 1416 bp, Homo sapien
cgggagctatttaacgaggtttagggtaggctcctaggtcactgcgcaggactgctccgttacaggtgggcaggggaggcggctgcgttacaggtgggcaggggaggcggctgcgttacaggtgggcaggggaggcggctgcgttacaggtgggcaggggaggcggctgcgttacaggtgggcaggggaggcggctccgttacaggtgggcaggggaggcggctgcgttacaggtgggcaggggaggcggctgcgttacaggtgggcaggggaggcggctgcgttacaggtgggcaggggaggcggctccgttacaggtgggcaggggaggcggctccgttacaggtgggcaggggaggcggctgcgttacaggtgggcaggggaggcggctgcgttacaggtgggcgggggaggcggctgcgttacaggtgggcgggggaggcggctgcgttacaggtgggcaggggaggcggctgcgttacaggtgggcgggggaggcggctgcgttacaggtgggcgggggaggcggctcctttacaggtgggcgggggaggcggctgcgttacaggtgggcgggggaggcggctccgttacaggtgggcgggggaggcggctgcgttacaggtgggcgggggaggcggctgcgttacaggtgggcgggggaggcggctgcgttacaggtgggcgggggaggcggctgcgttacaggtgggcgggggaggctgctccgttacaggtgggcggggggggcggctgcgttacaggtgggcggggggggcggctgcgttacaggtgggcgggggaggcggctgcgttacaggtgggcgggggaggcggctccgttacaggtgggcgggggaggcggctgcgttacaggtgggcgggggaggcggctgcgttacaggtgggcgggggaggcggctgcgttacaggtgggcaggggaggcggctgcgttacaggtgggcaggggaggcggctccgttacaggtgggcaggggaggcggctccgttacaggtgggcaggggaggcggctgcgttacaggtgggcaggggaggcggctgcgttacaggtgggcgggggaggcggctgcgttacaggtgggcgggggaggcggctgcgttacaggtgggcaggggaggcggctgcgttacaggtgggcgggggaggcggctgcgttacaggtgggcgggggaggcggctccgttacaggtgggcgggggaggcggctgcgttacaggtgggcgggggaggcggctgcgttacaggtgggcgggggaggcggctgcgttacaggtgggcggggggggcggctgcgttacaggtgggcgggcggtgctgcaggaggactgctcagggagtggcgcctggaccctgagccccttctctgctgactggggagaggctcacggaac

SEQ ID NO: 45110 - DNA, 2597 bp, Homo sapien
cgctctgctggccgcgcgggggaggggcgccggccgccggggagcgcgctgtcaatcaggccgcgccgccgccccccccccccgccccgccgcggagccggccgtaaataaccctgtaactaacccggccgctagcgcgggggcgctgggccccgctgggatcgatgcgggcggccgcgccggctgggctctgcgggctggcacccggcccggggcgggacccacctccgctttcgggtaattaatttataaacagaggcggcggtggagctggcggagcctgcatagtgggggctgcggggactcgggaggcccgggcgggagggagaggccgagagacctgggacgcggcgccttagacgcgggcgctgcgtgcgcattggggcgagtgtggccacgcgggacagtgaccctgcgcagccgggactgggcgacccctgtgctagtgtggcgtgcgtgcgcgggcgctgccttgcctttgtgacaagctttggccagccgcgtctactatggggacctcagattttcttgcctcccaccgaagagggggtcccctgggcggtcagcccctggctggcacttctggactctctcgctgccccgcaggctctgtggcctcgggacgtctgcacagccccctccccgcaaggctcagccgcctctcaggccggaagcctccaggcacccggctccccttcggggaagagcttttcccgacacttcctcgcccagcatcttgtctgccgtctcggccctgtggccgcccatcctcctgccccgtgcccgagaccagcccaggggccgagcacggccgagtggtgtggtcagttccccacctcagtgttctacgccaggacgcgggctggggaggatgagggcgcatagccggggggatcactgctgttgtcccccacccagatctcctgagggtccggcaggaggtggcggctgcagctctgaggggccccagtggcctggaagcccacctgccctcctccacggcaggtcagcgtcggaagcagggcctggctcagcaccgggagggcgccgccccagctgccgccccgtccttctcggagaggtactggggtggctgccgttctctgcttgtttctggggtgccgcccgcacccccgcgctctcagccaccagcacgcgccccgagagtgccaagcactgtgttcagctctaggttcgggtccgggcagagcgtttcgggggtgacaccgatctgggctgcagtgttgagggcgccactggggtgcgtgagggaggctgaggcccatcagggggttccctggaggagaagccagagaaggggagagctccaagtctggaaccccggggtcagtcgggaggggtcggccagaggactcagagctggaggcggagggggggtcctggctggcgctcaaatgtagacgccggcgccggatctgttcccggcacagacaaggcctccggcacagacccgggtttctcgggtccaggacacgaggcggggcggggcgcctggagaagggaggggccgcctgaggcccgagtccctgcccggccgctgagcccggcgtctgcagctgcctccaccgccgcccggattgcggctaatgacgcccccgcttcccccgccgctcgggtccgcaggggaggggagcaggcggggccggcgccccgcgcagtaattaccgctgcagccgtcgccgcccgccgggtcagcgcctccgcgccgccgccgagattaattggcgccgccggcgggggcggggatggcgcgcgacctggggccgtaacgagctgcgcatcgaccgcccgcggggccggcaattagcggaggcggcgggggaggggcgccggggcctttacgggaacgggggcgggggggacgccgctcattgcgctgccgtccacagggagctgcctcagccgccccccttgctgtcgccgcagaatgcccctcacgtcgccctgggcccccatctcaggccccccttcctgggggtgccctcggctctgtgccagaccccaggtgaggaggcgggtgcgcatcccctgggagcccgcgtggaggctcgcggacccggccctgcccctgtcggagccgagacggaccgggtaggggattgcaaagggccggctcggaccgcctcggaccccccgaccccgcgttgtccccctccccaccaggctacggcttcctgccccccgcgcaggcggagatgttcgcctggcagcaggagctcctgcggaagcagaacctggcccggtaggtgcggggaggcgggcggggccgcgcggcccgggaggcggctgacccgcgtctgcccccggcccaggctggagctgcccgccgacctcctgcggcagaaggagctggagagcgcgcgcccacagctgctggcgcccgagaccgccctgcgccccaacgacggcgccgaggagctgcagcggcgcggggccctgctggtgctgaaccacggcgcggcgccactgctggccctgcccccccaggggcccccgggctccggaccccccaccccgtcccgggactctgcccggcgagccccccggaaggggggtcccggccctgcctcagcgcg

SEQ ID NO: 45111 - DNA, 1220 bp, Homo sapien
cggggtgggacaggacgagcaagaggttctgctcacgcatgtccccactaacctggccgaggggctcccgcccggcttatccggactccgggcagcctcgcgtgcttcccgtgtctccgcttgtggagaattttcggactcggattcggactcggagtcaaagcccgaagctaggaactcgtccaccgtcagctccgccaggcgcctgcgggtcacgcaggagtcacagctgcccgcacgcccagctcgccccagccccgctgagaggagcaagaaaagcccccttggatacagacacccaccgggaggccaaatcggccctcggacccgcggcttacctcttgcggctccccgcagctgccatgacaccaacccgaagcgtgcaccccacttccggccccagaatgccgcgcggctgcgcacttccgccgcccaggccccgcccctttccccgccccgccgcgccacgcccagccgagtggctctatggttctccgaccgcaacgccggcggcctcagggcgggagggcgcgttcgcgtgctcggtgcgggcagccccggtggggcccagatgcgcctcccgctcggcgcccggctccgtaggacgcggtgacgccggtgtccgccccggggaagaccgggagtcccgccgcgcccgcagcccacccggcgctccgaaggcacgcgcctgcgaggacgccagactgcaacggcggggctcctatgcaaagagctcccacaaatcaacaataaaaagcagggagtccagtggaaaacgcgaggggcagtgggaaccgcactgatgtcgccagctcgacaaaagacgggcgacccgagggccaggctggcttcgcctccgatccgcggagaccgggccagcgccacgaacaccacgcagggcgctccccgtccatggccctctgggtgccgaccgcggctcttcccggggacgccgcacgggacgaagacggtggggaggccggcgccttccttcccgctaccagcctgacacccgggcccccgggcctggacagccagaccccgcgacaagggcgccgcggggcgcaggcacggctcccccagccctggcgctgagggggcgcgtgaggcgaacacgggcggattggcctcggggtcccattcgacttcttggtgccgcggggccccggggctccccggaggagagcaagttagggggtcgggggagcggggatggcttc

SEQ ID NO: 45112 - DNA, 1820 bp, Homo sapien
cggggaagaaggaaggcgagacctaggggggcttcccggaggaggaggaggaggagggctaggccgggggcttcccagaggaggaggatggcggggcctggggggcttctcggagaaggaagatggcgaggcctaggggggcttctcggaggaggaggagggcgaggcctggtggggggcttcccggaggaggaggatggcggggtctgggggtgcttctcggaggaggaggcggacccggggcgcagcgctggaagaatccgcgtccaacgtctagtccccgaagcctctcgggaggcggggcgggcggcgccgagaaacagcggctgcgggcgggagcggcgggagtgagcgacacagagcgggccgccaccgccgagcagccctccggcagtctccgcgtccgttaagcccgcgggtcctccgcgaatcggcggtgggtccggcagccgaatgcagccccgcagcgagcgcccggccggcaggacgcagagcccggagcacggcagcccggggcccgggcccgaggcgccgccgcctccaccgccgcagccgccggcgtgagtgggcgggggtcggggcgcggggggcggcctcgggacctgcgcggcccccgccctcgcgtccgctcgcagaaggggcgggggccgcttccgagggccgggggaggtcgggactcaggtgcggagcggggtcggcccggagtaggttccccacccgcgccccgcgcgcccaggacgcgactcccgctgcggtcccgagagggcggctagggacgcggaggagctgagctcgtgggggcgccgggaagcggggccggacgcggggctctgttcgcggctctgactacgccccaggggagcaggggcgcagcggaggcctggacacggcgcgctccggggcgggggtccttggcggaggtcaggcgagggctgccggcgcccccgtcgcaccaggggctgggtccccgcgggctgcccgggccccccagcggctccagggcgggcgggcggctccagcggggcgaagcctgacccgcccgcctcctgcagccccgaggcagagcgcacgcggccccggcaggctcggcccgcagcccccatggagggagccgtgcagctgctgagccgcgagggccacagcgtggcccacaactccaagcggcactaccacgatgccttcgtggccatgagccgcatgcgccagcgcggcctcctgtgcgacatcgtcctgcacgtggctgccaaggagatccgtgcgcacaaagtggtgctggcctcctgcagcccctacttccacgccatgttcacaagcaagtacccgcctgggcggcgctgggggctccgtgggtccctcgggtcagctcgtgtaacccgctgtccccgcagatgagatgagcgagagccgccagacccacgtgacgctgcacgacatcgaccctcaggccttggaccagctggtgcagtttgcctacacggctgagattgtggtgggcgagggcaatgtgcaggtgagggctccctcacccggatcccggtgtcccccgaccctgtgcctccctcacctgcctctcggtgccccgtagactctgctcccagccgccagtctcctgcagctgaatggcgtccgagacgcttgctgcaagtttctactgagtcagctcgacccctccaactgcctgggtatccggggctttgccgatgcgcactcctgcagcgacctgctcaaggccgcccacaggtacgtgctgcagcacttcgtggacgtggccaagaccgaggagtttatgctgctgcccctgaaacaggtaacagctggcg

SEQ ID NO: 45113 - DNA, 772 bp, Homo sapien
cggcagatgggaacctgtatgctgtgggcggctacgacagctcctcacacctggccactgtggagaagtatgagccccaggtgcatagtgcacccctcctggccaccccctcccgtgcgccgcggggccctcctccctctgtttacccacatcccccccattcctgacaccccaccctggagtcggggctgcggcagaggagggatgccagtggcgggtctgcgtccagcccacgccctcgcccccaggtgaacgtgtggtcgcccgtggcgtccatgctgagccgacgcagctcagcgggcgtggccgtgctggagggtgccctgtacgtggcagggggcaacgacggcaccagctgcctcaactcggtagagagatacagtccaaaggctggagcctgggaaagcgtggcgcccatgaatatccgcaggtccgcagtggggctgcggggaggggggcgcgggtccgcagtggggctgtgggaggggtccgcgcgtccgcagtggggatgtgctgcggggaggggggcgcgggtccgcagtggggatgtgctgccgggaggggggcgcgggtccgcagtggggatgtgctgccgggaggggggcgcgggtccgcagtggggatgtgctgccgggaggggggcgcgggtccgcagtggggatgtgctgtgagaagggagttctcccaacctcagcgagcatgtcccgccaccacccctttttgtggtgcagcccctccccccgcatcccttcctgcagccaggggctcaccc

SEQ ID NO: 45114 - DNA, 837 bp, Homo sapien
cgggcgggacgtcccggagccccgcctgcccgcgggaggcgggggcaggaggctgtggacagggacccagacttgccgacctgtacgactctggccatggggaacagccactgtgtccctcaggcccccaggaggctccgggcctccttctccagaaagccctcgctgaagggaaacaggtgagcggggcgtgggtgcggccacctgggcgcagggctcccccacccgctccggggccaagccacgagaccccttgccttgtccccagagaggacagcgcgcggatgtcggccggcctgccgggccccgaggctgctcgaagcggggacgccgccgccaacaagctcttccactacatcccgggcacggtgagcgcggcgtgcacggtggctgtggtctgggagcgtggctctgcccgcgcgtgtgtgccgtgtgtccgtgcagctcagggtcttcccctcgcccccggggcgttcagaccccggtaggtgaggagccgacgctgactgccccgccctggggagctcatccggccgaaagtctgagcggagagcgaaaccgcgacgcaggactgagtcagtcgggagagagctgggcggggcgggccgcgggcggggcctcccgggacctcctcccgcaggggaccagcgcacgtgtctctgtcgctgcagtggggcttggggtcgtgccggcaggtagtgtcacttgagagtaaggggcctcagatgagcagcgagccagccggtcacctacaccggcctttctccctgggtgtcccgcaggaagttgccgctgggtatggccgcctggtccacagcaatccctctgtgcacgcgc

SEQ ID NO: 45115 - DNA, 1547 bp, Homo sapien
gcggagggtgcctgtgaggaacctgggaaaagttgtgcattacgccaaggtccagctgcggttccagcacagccaggtgggggccgggctgggtggagcacgctaagggtgcagcatccccatcagcctggggctccccagactccgcactgacgaccctgctccccgcgcaggatgtcagcgactgctacctggagctattccccgcccacctgtacttccaggcccacggctcggaaggactcacatttcaggtgaggcggtgggcaatggggtggggccatggccgcccttccctccatggatccctgaagctcctcctaccctgtgcctggcaggggctgttaccgctgacggagctgagtgtctgcccgctcgaggggtcccgagagcacgccttccagatcacaggtgtttgggatgcttcccgggcccccagaggcactcctgacccaggacttggagaggggcctgccctgtggctgcggagcacgtgtgtgtatgtgtgtgccctctctgccctgcccgcaggcccactgcccgcacccctcctggtgctctgccccagccgggccgagctggaccgctggctttaccacctggagaagcagacggccctcctcggggggccgcggcgctgccactcggcacccccacaggtcagtgccggggaccccacccccctccccaccctgatcctcgcagccggctctgacctcctcctcacaggggtcctgcggagacgaactcccctggactttgcagcgccgtctaacccggctgcggacggcgtcagggcacgaacccggcggcagtgctgtctgtgcctcgagggtcaagctgcagcacctgcccgcacaggtgggtgggaggtgcgtggggctgtagggggatgggaggggtgcatggtggtgggcagggcggtgcaacagcagctcagttccctcatcgcctgaccccacccccacccacccaggagcagtgggaccggctcttggtcctgtacccaacgtccttggccattttctccgaggagctggacgggctttgcttcaaggtgggcccctccccactgtgggcccgccccagggaggcagctgtgtgggggtgggagggggcagccatgcaggaggaacctgtatttcggggcttgttgagacagagcgcagggccctgcccacccagcccgcggtcctggtcagtctggtctccgctgtgacatggaggagcccctgcccgccctgaggttctcaccctgaggttcttgaccgtcaccctggggcgggcagcatggggctgagagcccctcccggggactcccttgtgtgtgcctgcccgtgaggcgtgtgtgtgcacacgtgcgtgtgcgtgtgtcctccagggcgggctccgggaagggggtgtgcactcacggtaaccttcagtcactgaggaacaaacacagggccctccccatggttcacccggcccaacttcttctctggggaccccaagaggccagtcctgtggctttgtgtgtctgcccctagccggcgaaggcccccgcg

SEQ ID NO: 45116 - DNA, 2352 bp, Homo sapien
cggtagaagagaggggtcagagggcccgggcgagggcggcacctcgtcctgccctgggcgcctgtggtcgtctcctcatcctgcatctccctggcccgggcctggctcctaggagctggggctggggctgtggctgcggcgcccttgccccacctgccggcggaagtagcggatggcagagatggtgccgacgttggccagcaaggctgcaagagaagcacaggctcttctgagggccagcctggctgtcggcaccgtctgcccgcaagacccagccctcaaagggcgggcaaggtcggtgcggccagggccgcagctcagcctggggggagcaggtcaggggtgagccccggggcccccgtgcacccctcgtcctgccagcgcccctcggtctggcttctaggcgcagctccctctgcccccaggcacccaaacctgttttccaggcgtctggggtatgcggatctgacgtcctcacagcccaggtggcaaaagctacaaacaccaggcacatgtcattctggctgaaggcaaatgatgggacaggcccccggagctcccctaggacagaagctcaccttcagccccacggctgcactcagagatggccccgcacacgcccgccccgggaaccgcctgcccccacccccaccaaccccgggaaccgcctcccactccccccgccaaccccgggaaccgcctcccactccccccgccaaccccgggaaccgcctcccactccccccgccaaccccgggaaccgcctcccactccccccgccaaccccgggaaccgcctcccactccccccgccaaccccgggaaccgcctcccactccccccgccaaccccgggaaccgcctcccactccccccgccaaccccgggaaccgcctcccactccccccgcaaccccgggaaccgcctcccactccccccgcaaccccgggaaccgcctcccgctccccccaccaaccccgggaaccgcctcccgctccccccaccaaccccgggaaccgcctcccgctccccccgcaaccccgggaaccgcctcccgctccccccaccaaccccgggaaccgcctcccgctccccccaccaaccccgggaaccgcctcccgctccccccaccaaccccgggaaccgcctcccgctccccccaccaaccccgggaaccgcctcccaccaccccgccaaccccgggaaccgcctgcccccaccgaccaaccccgggaaccgcctcccactccccccgcaaccccgggaaccgcctcccgctccccccaccaaccccgggaaccgcctcccgctccccccaccaaccccgggaaccgcctcccgctccccccaccaaccccgggaaccgcctcccgctccccccaccaaccccgggaaccgcctcccgctccccccaccaaccccgggaaccgcctcccgctccccccaccaaccccgggaaccgcctcccgctccccccaccaaccccgggaaccgcctcccgctccccccaccaaccccgggaaccgcctcccgctccccccaccaaccccgggaaccgcctcccgctccccccaccaaccccgggaaccgcctcccgctccccccaccaaccccgggaaccgcctcccgctccccccgcaaccccgggaaccgcctgcccccaccgaccaaccccgggaaccgcctcccacccccaccaaccccgggaaccgcctcccaatccccccaaccccgggaactgcctcccacccccaccaaccccgggaaccgcctcccaatccccccaaccccgggaactgcctcccaccacccccaaccccgggaaccgcctcccactccccccgcaaccccgggaaccgcctcccaccaccccgcaaccccgggaaccgcctgcccccaccgaccaaccccgggaaccgcctcccaatccccccaaccccaggaaccgcctcccaaccccccccaaccccaggaaccgcctcccaaccccccccaaccccaggaactgcctgccccgggagccgcttcccccgcaaccccgggaaccacctgccccgcacacggccgccccgggaaccgcctgcctccccctccaaccccaggaaccgcctgccccaccctaaccctgcacactcttggcctgggaactgcctgccccgcacacgcccgccccgggaaccgcctgccccagatacatccatcatgggacatgtctgtcctaagatacatttgtgctggacacgtctaccctggacacgtcttcccgaaacccctctgtcatggacacgtcttcctgagaactggttgccccgggaaccgcctgccccgggaaccgcccgccctggacgcgtctg

SEQ ID NO: 45117 - DNA, 1103 bp, Homo sapien
ggaaccctgccagaggctgggggagggacgccgccgtcacatgggcccgaacacagggcaacggcggcgcagagccaaccccctgaacaacccgggtgcttggactgggccgccccatctggactgtgtgctgggatgactgggggctggtccccaggctcccctgctaggggatgacccaagcccggcctgcccggcccctgcggccccctgcttggccaagatccctggacagtgtgtgcctgggatctggacgggctgtgggatccgagagcacgtacctgcccgtctaagagccaggtggagccgctctaccacggctggcttgaggggggtcccaggccccgccccctcggaggccgaccggggaggctccagggcctgcagtgggagcgggacagccggccccagcacgccctcaagcctgtcctccccgaagaagaagtgttcatagacctcagggatggagatgggcacggggtctccaggtatgggggccggcacaggatcagctctcgggagcggctccggggacccccgccgcctcgacctctgggctccaacgtctgggaagaagaactcgcacatgtccggccactggacgcctgccggatcctgaccggccgctgccgcctcagcctcttcgttctcctcgatggtgtcacagaagaagaactcgtaggcctccgggagggtcacggcaaagctgctcccgggcccgaccctcgtcacggcagagggaggggggcgaggcaggtgcttgaggatccgaggctggtggggccggggcccgacagccacagcctcccaggctccgggccccccgtgggccccagttgctgtctggggggctgagggccgggctgaggcctgtcctgagcctggcttattggggctgggcccagccacggagaagcgcactttcttcttcctggggacttgggtgagacccagtgcgggtgccccagagcagcatccgggggcccctgctgagggctcagacacaaccgcctccatctccaccacatcaggcccagctctgcgggtgggaggccaggcgaggccagcggcgtcggctctgggaacaggtgtagacacaagcc

SEQ ID NO: 45118 - DNA, 2892 bp, Homo sapien
gctcagggggagaccctctgcctcggctgagtgcctcgaactgcgccggacccccccgaacgcgggaccgggatggcgaccgcggcgctggttcaggggaacgtccggcgctgcctggtaactcggtggtcgacaacggcacgtgctcgggacgatgagggaggagcccccagtcctcacccactggggaggcggaacctcccttaccggggcaggggaggctgcgggcagggccgacgccctcgtgagcgacgtccttggccccggcactcggtgtccacagcccagctcggacccgcgcgctcccgccgggcgccccccgcacagacgcctggaggaggggtctgcggtgggcacgggcagctctgcacttaacaggagaacccagcgggggtcttcagggccaagggcggccgccctcatcccagcgccgctcaggaccgcagcctccgccttccgcggtccggggactgggagtcgggaaaggggcctccgaaaagtaacttgcccggcgatgctgcgcgaccgccttccagcaccgggaagattctgggcactcagggacgttgagcttcccacctgagcctccggggggacccctcacaaccgccaccgcagagcgaggcaaacccaacgcgggggcagagggcgggtgcgcatgcggggctgcagggatgcggaggggagggcgcggagcggagggcgcggagcggaggggtcgccctcagtcctcggtcccgcccccagcccgcccccccgggcccgcccgacgcccccagccacctgcagaccgcggccctgggaggagggcgggaccccggcgcggcgtggctgcggggcgctcccaaagtcaactcttcaccaagacaaagaaagaaaactcgtgacgcagactctggaataataaatacgttttctctgctacagtctcggcaaaggccacggccctagaacggggcgccgcctccgatgcagtctcagggccacagcctcagcgcagccacggcctccagggcccacccgggccctgcggccccgccctgggggcggcgggcagcgcccgggtcagacccggcagcagcggcggcgcgagcagagggaaggggccgccgagcgatggcagcagcgggcggcccgcgtagacctcgggcgctggggcctctgcgggggcagccggggacagcgaggccgggcggcgggagggtcccagctggcgcaggcaggctgccaggtggcccagcaggcgggagcgcacgtcggccgggacgccctcgcagccggccaggaagcggttcacctccgccagacactcgtggaagccggcgcggtacttgcccagaacggcggggtcggcgctgagcgcggctgcgggagcgacacaggaggagaggtcggtgccgggtcccgggggtcccgcgccctccccccgcctccaagccgccgccgcccgcgcctcacccgtcacctgcacgcgacgcaggctccgcaggtgtctcacggtcatctccaggatgtccgccttctccagcttcgagtggcgggagctctgggggcggggataggcgggaggtccaggtcagctgcgacccagactccgggtctcgggccttcgcccccgacttacctcttttctgagggcgtccaggatgagggttttgagctgagcgaggctctcgttaatacgcgctcggcgccgcttctccatgaccggcttggaggactgcgggtcgggcaccggctgagtcccgcgtccctcccgccccccggtcgcccccctcacgcccggccgggaccccaccttgcggtgctcggccgcgctccggggcttgtctggggtccggctggcgctggccggcgctcctgccatcggcgaggcgctcggtttccccggcgtgtctgcggccatggtgcgccccgcgcctccccgtgccgggtggagcgcgccgccacggaccacgggcgggctggcgggcgagcggcgagcgcgcggcgatccgagcccctagggcggatcccggctccaggcccgcgcgcgcctcaggccgtttccctatttaaggcctcgccgccgcggggtgtgtgaacccggctccgcattctttcccacactcgccccagccaatcgacggccgcgctcctcccccgctcgctgtcagtcacgcctcggctccgggcgcggcctccgcgggcgacaatggcatgcggggcccccgcccgcgcccccctccgacaccgctggggacagggccgggtgatcccgcgctccccgatgcagccggggccgagcaacgcgccgggaggggccgctgggggcgaacggggcccgggacccccggggctgggcggagtctcggggctcactctcccgcccagggggccgggagccggggctggacggagctggggctgtggccgcgcgggaagtcgggaaggaaattcccccagtggcgcagggtccggcggcgccgaggggtgggcgagcctcggtctcgagcctcttggcttcctccgcccgtccccactccggtcccggtttgggccctgctcggtctccgagtttgatccgacaccggctcggcctccgggggtcccaccctcaggtgtgcggcctggagcacggagggctgcagaaagccttgggagcgacagagccgggggaaggtcggcggccgggtcggcaggcgggagggcggagtcagcggacggcgaaggggcgcacgggtggccccgcagagcagggccggtgatggcgcgggccgggccggaccacgaggagcagaacgtgcgcgtgacgcgagcgggctggtgacgtcaccaggcacccggggcgatgacgcaagcctgctgggatgacgtcatgtggcccgtgtcgccacgtgcttccaggtgacc

SEQ ID NO: 45119 - DNA, 997 bp, Homo sapien
cgctgcggggcacgttggtcctttccgcactcggggtccccggcggcctcacgcgtccgtgcagcggaggcttcctgagccccctggagagcctggcctgggcccgggtgtggagaccctcccgggctttcaatccgggcaggaggcagatggcagactcagcagtcacgtaagagaaccgaattaggtgggtggcctgggtggacaaaagccttcttgacgccgggtggtcccaaaggcttctgcggggtggggggtcctcaggggggaagcctcaagggagggcgtggcattcccagggtgcgaagggggcgcagggacgagggaggtggggagggggagctgggccagcgagaaccgggagcttctggtcggggagggagtcggggaactttttggggagcttttctgagccagggagtcggctgattggcaggttcgcccctgcccgggcacctggacccagggtttctgtgcggaagcttcccctcccctcggaccccacgtctaatctggccccaagcaaagtcctgcggcccacgcgggaaggcgccctcttcgcggcgctgaccccggccctccgcggtgcccctgaggcgccccccacaccccgccgcttgcacaggggcgcggggggctgcgaggccggagcgggggtggcgccctctccgccgagaggctgtccgcgcccctcgccgactggggaaagccgcgggggctgggcgggcgtctcggaggtggccccgcgagcacttaagccccggctctcctgccccgacctctctgcgcgcgcctcggcgctggagaggctcggaccggccccgtagcccaggaggtggtgtggatggtgtccccgtcccgcgtccctccccggcctgagcgctgggcccgggcgggaaagcccgcgagcgcccccagtggccgcagtcgccgccgcctcctgctgggggtcatcccaggggagctgccggcctgaatctccccagcccctgggccc

SEQ ID NO: 45120 - DNA, 2161 bp, Homo sapien
cccggcccatccagctaatttttaatttttttgagagatggggtcttgctattttgcccaggctagtctcgaacacccggtgtcaagagatcttgctgcctccgcctcccagagtgctgggatgacaggcgtgagtcaccacgcccagcctagacacagttctgaagggacaaagggggcctccgctccctcctttcaatcttcagctaggccaggctcccacttgggtcctccagccctcagtttccccctgcacccagccaggccaagctgcagaggcgcccggcccagagctgggaaggggcgtggcgggacccgcgcttgcagccgcgggacggaagggggcgcgaacctccccgcggcggggcctgggggggcggggccgggaggggcggggccgcgccccgtgctggccaatcagcgcccgccccggcaccgggacccgcctccgcgccgcagctcccggggggtccggcccggccgagcctcggtgtccggccccgcgggggaggggcgcggcctgcggagcgggatcggggccgggtctggggcccctcccggcggccttcgagccctgccgcccggctccgcgccgcccggagcccctcggcagtcccgtcacgtctcctccagattaggcattaactcgggtgcagccgcacttccggggggccgcggcgggggaggggcgcctgcgggatccagacccgccccccactctcctctccccgccccctcccgggccgcccctttcccgccccacggccgcgccgggcgctgcgtcccggggctttgttcgcggcggcgcgggtcgccggcctccgggcgggccgggggagggaggagggagggggcgggagggggaaggaaggaggagggggaggaggagggcgcggggagggggtaggggggcggggaggagagagggggaggggcgccgccctggccccgcccccccccgcccgcccgcccgcgctccgccgcctccggagctgcgtcccgtcctgtccagtcccgtccccggcgcggcccgcgcgctcctccgccgcctctcgcctgcgccatggccggccggtcccacccgggcccgctgcggccgctgctgccgctccttgtggtggccgcgtgcgtcctgcccggagccggcgggacatgcccggagcgcgcgctggagcggcgcgaggaggaggcgaacgtggtgctcaccgggacggtggaggagatcctcaacgtggacccggtgcagcacacgtactcctgcaaggtgcgcccacccggaccccggcctcccctcgcgacgcctgccgccccgccgggacccccgccccaggccgtgggaaccagccccggtcgctccgcagcccccgctccggctcccttggcgaccgccaagccccgggagggggggtcgccgggtcccgggaaactcgcgggcgccggggaaagttgctgcgccgccgccgtcctccgcccgccgccgcctccctcctcgcggagacaagtgcacctcgcccacggactgcggctgccgcgcgccctccctaccggccgagaaggagaggggcctggggagggggggcctttgcccgggcggggagcgggggctgggcctgggatccgcttgttcccctccccagaggcctttcccggggcgagaggggttggtcaggagagaaaaaggggcgcacagcctgagctcccaaccccgggagccaggtggggggtgccgcagtggtgcggggggggggcgtgcaggagcagagaggtgggcggggccgtcaccgggcctcgtgtgcttgggggcagggccggtgccccatcgcgctcctgcgggaaccggggctccccaccccggggaggggaagtttccctggtttctccttcaggtgcttctgggagcccccggggtaggtacgctgggacccccaccatcttctcctagtaggggctcgggggacccagagccggcgcccgtgtacccccaaaaccatctcctgggaccagaaatccactcatttccctccacggaggtggagaaggtggcagcttctttcagactggccggtgcgggctacagctgggctcccccgccggcccagtctcctccacagcggccagggcactttgccaggcccctgcaggattttcccgacttcctccc

SEQ ID NO: 45121 - DNA, 2478 bp, Homo sapien
cggctgggggactccaggaaggcagcaggtgtgggcagtgggtcctctggggtggactgaggtgaggcctgggtgtgaccacgcggtggcactggtggctgccggcagctgtcgtctgcagagtgggtgagaccgagtgtggcagatggcttggtccgcggtgctggaggggactggcggagcagaagcgccctggcgccgggtccttgctttcctggagctggggcttggggaatggggtcggtcattgcagggacagaggagagggcagggtaatgggtgcgcaggggtcccttccaaaggctgcgggtggccaggggtgtgcgggggcgctgaggtgcggtcgccgagagattctggcctccagggtggtcgggcctggcatggactctaggggatggtgcacacaccggaccggacgggcccctcccttacccccggatcccccggctgggcagcggccagggagaggggcgacctacgggggcgggtgtggggacgccggactacgcgtcaggagtcccagatgggcccagacccccattccccgccccgggccgcagtgacgtcagggcccggacgttcccggaacggcctcttgggggcgttccagccccacggacccgcagggagtccccgccgcaatttgcatggggctcatttgcatgaccccgccccgcgcgggagtcgggggcgccggcgactggaggagccactgtcaatccccaggggaaagtgggcgaggcgatttctgggccgctcacctcactccaccctccagctcgcgccgcacctggggccctcccccacctacgccccgccagggcggggccgcgggcgcagacactcgcgggcacacgcacgacgacgcgcacacgcggtcgcacgcggccccccgagccccctgcggcgactccgattcacccccgcgggtgcggggcgcggacccgcccggcccagctcctgctccccaggcgcttcctcctcccgcgacctgccccggccgcacccgcctccgctccagcacgcgacgctgcccggcgcgacccctgctcccccggcccagccccaccgctgccctcgactcaatcccagttgaacgcccgcagcctcagtcccacccccggcccagccccagcgcccccagtcccacccccggccccagcttcagcctcagcgcccccaggcccagccccagtcccacccccagtcccaacaccttcaggcccaccctcggccccagcctcagccaccccagccccagtcccggcccagccccagccccagcgctcccggccccgggcccagccccagccccagccccagccgagcacccccggccccgcctgcccggcgttcccttttgtgcggcgctctcccgtccgcatccgcccgatcctctggaactccccgcggacgccggggtccctggaggcggcttcctttgtctctgctcccgccctccctccgcggcgtcttcgcccctcactcacctccccagccccgcggggacgaggggagctggagggagcccgggacccggcgcggcctccgcaggcggcgctttcttctcgctcccgacgcggccgcccctcctgcctgcccgctcctatcgccgcttccgcctctgccggggacggggacagcagaccctcggcgcccggcccccgcgcacctgccgcgcgcaccgcctctccggcctgcgcggctccgggggctccgggaagaccgagcgctggcggccagcccggggaggctgtgggcagcaggggtggctgcgggctcccagtccctcctccgcctacctcggagcccacatttgggatttctactccgggagaattctgccctcctcccacgatgagcctggaggactggagccgggacctggcacccccagggctgtgactgggtgaactctgagggcacagctgctgtccgccgccccaggggtcccaggatggggcgagcagccctgaagaggcccaagggcaccccgtgaggagcccccacgctctgagagtggggcgcagagccggagccccgggccatgcctccgctgccgctggcgcgggacacccggcagccgcctggcgcctccctgctggtgcgaggcttcatggtgccctgcaacgcctgcctgatcctgctggccaccgccacgctcggcttcgcggtgctgctgttcctcaacaactgtaggtggccgcgggcggggcgtcgcactggccaagccccaaccccgaggcccctgcacatagaggctggaggccgcggcgggtccgcggggctcccggcagcttcccggggatgggatgggtcactctgcggacccctcggtccctggaggccgtccttgggctctcagtgggcctggccctcacccaaagctgcagaaacactttctgcgggagctggggagggaggggcagccggctacactgagagccggcagttgggggtagggcaggacctgcg

SEQ ID NO: 45122 - DNA, 2479 bp, Homo sapien
cgggggatgcccagggaggagggggcgtgtgggtgccccagggatcccagggagcgatgggaggctgcagaagggcacaggcctgccgcgggtggggggctggccagggagaataggagatagtagaggcggaggccaggaatttgcacttctccagggaagctggggaagagttggggagagggaggcaagaagattccccacccatcttaggcgcagggagcggtcagggaggcgccagaggtgggccagagctgtgacctggcctcacaccccgtcccggtggggctctcaggcccctgagggccagacgcgggacctgggtgcgacccgggcgggaggcggcagggctcagctgtgctggacgctgcagcagcgcgggaaggggctcccccggctccatggggtgaatcggtgaggggctccggtgccgatgtggaaggagctcctgagcagaactggggcctggactgcttgtgcccgagttggtttcgaggcgtctctgcttttcgctggaggcccacgaggtgggtgggaagtgggtgctcgcccgtcgcagaaacagagtcgggtgccgcctgcggcagacgcccctctccgcgcctgcaggtgcggggtgggggagaaaggtcatccctggagaggcccggggctggcgggaatcctcggcgggcggggtctgcgaggggcagggccggtcctgtgagcgcacgcacgcgtgtccgtgtccgtggtggacccccgatgcggcgcgggggcgggtgaatgcgcgggctgcgagcacggcaaggtctctcaggcttgtggacgtgggtacgggcgtctcggcaccctgagctttctcccctacccgccccagcgtgccggggaatgctgtgcggcttcggcgccgtgtgcgagcccaacgcggaggggccgggccgggcgtcctgcgtctgcaagaagagcccgtgccccagcgtggtggcgcctgtgtgtgggtcggacgcctccacctacagcaacgaatgcgagctgcagcgggcgcagtgcagccagcagcgccgcatccgcctgctcagccgcgggccgtgcggtgagcggggcggggccggtgcctggggcggggaggggcggggcctatgagatggagcgaggctgggaggggcttcggggccagtggggcgggggcaggggcggggcccggcggggaggagcggggctgggaggggcctggggggcggagcgggggagggggcggcccgtctgaccggcaaagccccgcccgcaggctcgcgggacccctgctccaacgtgacctgcagcttcggcagcacctgtgcgcgctcggccgacgggctgacggcctcgtgcctgtgccccgcgacctgccgtggcgcccccgaggggaccgtctgcggcagcgacggcgccgactaccccggcgagtgccagctcctgcgccgcgcctgcgcccgccaggagaatgtcttcaagaagttcgacggcccttgtggtgagcgcggcggcgggcgcacggctcgagctctgtgggcgcgcggcgacagcgtcctgactcctgccctcgacccccagacccctgtcagggcgccctccctgacccgagccgcagctgccgtgtgaacccgcgcacgcggcgccctgagatgctcctacggcccgagagctgccctgcccggcaggcgccagtgtgtggggacgacggagtcacctacgaaaacgactgtgtcatgggccgatcgggggccgcccggggtctcctcctgcagaaagtgcgctccggccagtgccagggtcgaggtgagcggctcccccgggggagggctccggccagtgccagggtcgaggtgggcggctcccccgggggagggctgcggccagtgccagggtcgaggtgggcggctcccctctgggagggccgcctgctcccctgctccctgcacatcccagggcagggatggagggtgctccagcctctccgtgactccctcacccctgcgtcctagaccagtgcccggagccctgccggttcaatgccgtgtgcctgtcccgccgtggccgtccccgctgctcctgcgaccgcgtcacctgtgacggggcctacaggcccgtgtgtgcccaggacgggcgcacgtatgacagtgattgctggcggcagcaggctgagtgccggcagcagcgtgccatccccagcaagcaccagggcccgtgtggtgagcgccccggggtggaggccaggcggggtgggctgctcctgcgtcagtccctgcctggacatcacatgccatcttcatccatcatgttcctcttggggtcctgggagtgggccggtccctctgggaaggctctggggagggtggagcctgtgtgcggagggtacctggatacctgggggctggtgaggcagaggcggggccttgtccaggctccctggtccctgacctcagccacgccctccctgggagtcctctggcctgtc

SEQ ID NO: 45123 - DNA, 1956 bp, Homo sapien
cggcagactggtttcctgcgtttatcacgggggccacgtcaggagccattgctgcgggagccacggccagagccaccactgcatcgcgcctgccgtcctctgctgtgacccctcgggccccgcaccccagtcacacaagccagcccgttgccaagaccacggcagcccccaccacacgtcggccccccaccactgcccccagccgtgtgcccggacgtcggcccccggccccccagcagcctccaaagccctgtgactcacagccctgcttccacggggggacctgccaggactgggcattgggcgggggcttcacctgcagctgcccggcaggcaggggaggcgccgtctgtgagaagggtaaggatgtccactgcagaggagggcggggaggcagcagggtgggggcaaggattgggggtggggctaagccaccatcaggctttgagttgggggcaggagcccggattaaggcggggtttcggccagatgcggtggctcacgcctgtaatcccagcactttgggaggccgaggcaggcggatcacctgaggtcgggagttcgagaccagcctgaccaacatggagacactctgtctctactaaaaatacaaaattagccgggcgtggtggtgggcgcctgtaatcccacctcgtgaggctgaggcaggagaatcgcttgaacctggcaggcggaggttgcggtgagccaggatcgcgccactgcactccagccggggcaaaaagagcaaaactccgtctcaaaaaaaaaaaaaaaaaaaaaagcagggggcggtttcagggataaaagtggggaatcctcggagcttttccagccggccctcccggtcgccctttgcagtgcttggcgcccctgtgccggccttcgagggccgctccttcctggccttccccactctccgcgcctaccacacgctgcgcctggcactggaattccgggcgctggagcctcaggggctgctgctgtacaatggcaacgcccggggcaaggacttcctggcattggcgctgctagatggccgcgtgcagctcaggtgggcggggaggggacggggccggggcagctcaggtgggcggggaggggacgggcgggggagggggggccggggcagctcaggtgggtggggtggggacgggggcggggcagctcaggtaggcggggtggggacggggccgggcgatggtcctgagcacctgctcctgccctcaggtttgacacaggttcggggccggcggtgctgaccagtgccgtgccggtagagccgggccagtggcaccgcctggagctgtcccggcactggcgccggggcaccctctcggtggatggtgagacccctgttctgggcgagagtcccagtggcaccgacggcctcaacctggacacagacctctttgtgggcggcgtacccgaggaccaggctgccgtgtgagtcccttggagggtggtgtggccccgaccccggccctttggggtcccggtgtacgaggtggctttgcctgtggcccctgagccctgacccggtgtccctcctggtggcagggcgctggagcggaccttcgtgggcgccggcctgagggggtgcatccgtttgctggacgtcaacaaccagcgcctggagcttggcattgggccgggggctgccacccgaggctctggcgtgggcgagtgcggggaccacccctgcctgcccaacccctgccatggcggggccccatgccagaacctggaggctggaaggttccattgccagtgcccgcccggccgcgtcggtgagggtggggccggggcgggtgggagtgggaccccggggcctgtgggcggtacccaaccgacgcctcctgggacctcggtcccggtcccgtcttcctccatccaggaccaacctgtgccgatgagaagagcccctgccagcccaacccctgccatggggcggcg

SEQ ID NO: 45124 - DNA, 1358 bp, Homo sapien
cgcaagggtgccctgcgtgtgggcgacggcccccgtgtgttgggggagtccccggtgagtgctctgggccgcgaggggactcccgctgctgcctgctcttcctcctcgggcggcagccccgcccctgccggcgctcacggagctgtttttctgtcctgttctcttggccgcctgccctgtcctctgcctcctctgcctccctgctctctgctctcgctctgcaaccccacccgctcttcggaggccagaaatcccgcaaggtactgtcggcctctcatccgctcaccgtctctggcgcctcaacccctagggtagctcctcccccactaaggaccctgccatttctgtgtgattaacgctgccccctagataggcaatgggcgggtggggcgggtgcgtgcaggtgcctgggccctgggtctgcaccgtgggtgggctctgcacagccacttacctggcgtccccgcaggttccgcacaccgtcctcaacctgaaggagccgctctacgtagggggcgctcccgacttcagcaagctggcccgtgctgctgccgtgtcctctggcttcgacggtgccatccagctggtatgtgggggcggggcgtcccagcagggcctccggggcgggcggggtggcaggcgggacaaggccctcaccctgccctgcaggtctccctcggaggccgccagctgctgaccccggagcacgtgctgcggcaggtggacgtcacgtcctttgcaggtcacccctgcacccgggcctcaggccacccctgcctcaatggggcctcctgcgtcccgagggaggctgcctatgtgtgcctgtgtcccgggggattctcaggaccgcactgcgagaagggtgagcctggcacagggcagggggcggaggccggatgggcccggagcccacgaggccccaccctcacctgcctatctcacagggctggtggagaagtcagcgggggacgtggataccttggcctttgacgggcggacctttgtcgagtacctcaacgctgtgaccgagaggtaacgtgccatcctctgctggctgtcggttccatctgtgccctcggggcgggacaccggacccccacaccaggagggcccaggaggggacggcccggtgctgccacctctgtcctcccgcctctctctcacctcccggtcctcccgcctctcactgtctgtctctttgtttccaagcgaactggccaatgagatccccgtgtgagtagagctcggcgccccccgctccctctcactcccactcctccatccttcctggtggggagcagagtccggagcccccggggaactttccatcccttgtggcggaggatgggggtccggcg

SEQ ID NO: 45125 - DNA, 1235 bp, Homo sapien
atggaggagggaggaggacctcggaggggaggaggagggtgcgcagaaccaggagaggcagtttggggagcaaccgctgcggagcgcgcaggacccagaggactcaaaggggacctggagggtgacgaggccttccgtggccgggggtgaggaggagggaagccgcgcgggcggagaggcgctggtgggtcccaggttggaggctgtgggtctgagaggcgaagcccaggggagcccggggccaccgctgaaaaggatggcagctgagcgcaggcgagggagaggcgcgcgtgtccgggacagaccgcggtgggagctcgactccggaaaccggcgggcctggggctgggacctacagggaggcggacgcggcacagccagggaggtcggtcccgcgggccccgccccgccccccagcctggagcgcccccctccggccccggtccgcagtggaggcggccccggaaaagccagagggtcttggaatggagggcgggacggagccgcctgcaacgcccgcgacccgcgacccggctgcccgcgggacccccggctctgaagcggggacggccggagcttccgcctgcagcccaaactcccaggcgcccggcaagagtggcgggcgcggaccctttaagaaggccggggggcgtggcctcggggcgtggcccggggcgtggcatcggggcgaggcttcgggggcggagcccaggcagcgccttcgcggagttgccggagggtgcggccgcccagagcgcaccccgagcgccggcgagcggcgcggtgagaccctcgtgcaggtgagcccggcgcacggcggcccagaatcctggaccccaggagaagcgtctacggccccgacaggtgggcgtggcgaaatgccacccgggccctcctcgcgctcccagctgggtcacgcctcagacccggggtcctggacgcctgcccccctccacccgcaggccctgccaggacactttggtccctggcccgccaggcctggcctcactcaggcttggctgtggggtcagagtcgggcagaacggaaccaacagtcctggcaggcccaggcggttggaggagaagtggtcggctctggacacctttgttgttttttgttttttgtttttgagatggcgtctcactgtgtcacccaggctggagtgcactggcgcggtcttggctcactgcaacctccacctcccgggtttatgcaattctcctgcctcagcctc

SEQ ID NO: 45126 - DNA, 777 bp, Homo sapien
cgggccatggcaggggcagggtggacatcccttgtggccctgccccgccgcacctgcacctgcacagcccgcgtgggcccgccccgccgcagctgaagtgcaccaccatgggcccggcccgcggctcgcggctcgcggctctgggcccggttcacctcgtcccggaagccgaggacgccggcgggatcggtccggacgccgtagtccggccagccgaagtactggaagtgctgcaccgtacgctgtggctcctccccgcggggcagggcctcgcgggcgcagggtgtacatcgcctgcagggctgtctgcaggcctgtctgcaggccacggtggctgctttctgggccacggtgcaccaggagaacacgcgtgtcatcgtcatgaccaccagggagatggagcggggccgggtaggggtgcggtgccagtgctcccagtgcccatcccaccccgtgcatcttcggctgcccaaggcccttcccgaccaggccaaggaggctgtgggacgccgtgggagtggggaggctcccacagagccccgtggctgcacgtacacacctgcgtctctgcaggtcgcaggggcggggtgccgaggtgctgccagcaaggctgatgcaaagcgctcccctcggaacaagtgtttccgggactggccagagctgcccggcagccaagagttcggccgtgtgcacatgcgcgtcctcggcaagggccaggcccagggctactgcgtgcgggagctgcaggtgtggcggccgggccaggtgagcctggcg

SEQ ID NO: 45127 - DNA, 1871 bp, Homo sapien
cgtggccacattctcagccctgggctggcggccgctcctcccacacacctctccaactgcagctttggtctccgttgtataccagagacgcccatttctgctccgggcagattacctcgtgttccctccagcccccgcccagtgtgtgtgggggggtcctccaggaccccatggacccctcacatttggtttttccttataaaataactgtcctcacagcctgcttcgcccgcccccagctccctcttcccttccccaggcacctgagccacctggggccatctcggcgccccctccccatttccttcctcctcctcctgctcgccttggctcccgcagcccctccgcttgggcactcccggaaacccagctgtgcctcagcctcctcctcccaccctggggtcacactcaccgcttgccccgctcaggaggagccacagcgtacggtgcagcacttccagtacttcggctggccggactacggcgtccgggccgatcccgccggcgtcctcggcttccgggacgaggtgaaccgggcccagagcagcaagccgcgggccgggcccatggtggtgcacttcagctgcggcggggcgggcccacgcgggctgtgcagatgcaggtgcggcggggcggggccacgcgggctgtgcaggtgcaggtgcggcggggcggggccacgcgggacgacgagggcggagccatcgggtgggcgggggcgcccccgcccccgccccccactctcgtcaaaggccgcctagtttgtcctcagtgggggcatcggatgcacgggcaccatcatcgtgattgacatcctggtggacgtcatccgcaggcagggcgagccgctccactctgggtccccccgccctgccctgctatagccccacccctccgggcgaccccacccctccggacgaccccacccctcaggacgaccccacccctcaggacgaccccaccgctaccggcaagccccgcccctcatcagcagccccgcccctgcctgccggcaccttccccccatccgtagcccctccccaagcgcgcttgtccgcagggctggactgcgacaccgacgtcccgaagacgatccagctggtttggcggcagcactggggaatggtgcagacggaggctccgtacaagttcacgtacctggcgctgcagcggcacatccggggcgagtaactgcgcctgcgcgagcaggtgggggcgtggccctgcggggcgtggcctgtgcgggcgtcgccatggtgaccggcggcccctccccccagcgcgagccgcctcaggagcgcgagaaccaaaacgtgggcgccgccccccgctaatcgggttgcagcccccggctccccgggcatccccggtgtgagtggagcgccggggccggtccggagtcctctgggagggactgggacgtgcggggtgcagggctgagccgctgctccgcgcgcagaaccccgcagccctgggacggcgaggacgcgaacctgcggagccgcgggtgtctgaggagccgcagggaacccccggcctagccgcgcccgcgtgtggccggagctgcgggccgggactgtgtccaggacagagccacaagcttgtccccagctcagggaggtccaggggcggcagagggagcgacaggctgcgaagcccaccggtgaccacgtgtgaacccgcgtgcgcccccagctcggccactccgtgcgggtctgccctcaccgcagctccggcctgccggccctgcctgctcccgtggtctgggatgtggccccggtgaggacccggccccatcaggcacagggtggatgtctgtggagtgaggtgtgtgtgacatattcatgtgaccacccgtgcagcgtcacgcg

SEQ ID NO: 45128 - DNA, 675 bp, Homo sapien
cggtggagtcctcagagatgccaggctcctttcgcgtcctcggggaccgacttccagtggctgctgtgcccttgggccccccagtgggggacgccccatggagctgggcgagggcggctgacctgggcagaggctgctggccctaattatcagtcagaggcccgaggggggaggcggctgtgctggtggccgggggccgggggggcaggggcaggcagcgcaggttcccggtcttgagcgcgcactgcaccggccagagtgccacacagaagagcatcagcagcagggcagagaccagtgccatgcgcctccagtccctgcagcgcgcccagcagcgggccaggcggccccggcggggggcagggtcccgggcgggcgcgggcggctcggcaggcttgctcaaacccacgtccacgcatacgaaaccgggctcgcggccaggtgtggtgggcagtggctggcagcacagcttggtgccctccagccacacaggctcctcacgccgcaaatgcgccggcatccgggcctgcagctggcggctggtgcacagcgcgggggctccggcgggcggcacggccgtgggctgcctgcagaaggggcaaggtacagcctcaccaccggggcggcccacaggctgagcagccgccagccgggccaggcactccaggcagaaga

SEQ ID NO: 45129 - DNA, 1239 bp, Homo sapien
cggtgccgcagggcgtctgagacccacggtggagcccgggcctggcgtgcgggaggcggccacgacggcgcctttctcccaggaactccgggagggaccccaggactcagcgccagggcagccttggcaggtgcagtgaggcagtgacttgtgggggttagatgtgggcctgccccacgtgggcagggatcagccaggcatgggggtccagcggatccgagcggggccacagagctctggaggacttttctgcacaatgaatttctgcttaaaaacagagatcaagaggaagctctatcctgcagctccggaaatgggtggctgcgtgcttggggtctccgccacgcgggaggacagcccagaggcaccctggtctcaggcagctggttcctaggctgtgtcctccccactggccgggcaccggctggaacggcacgaggaccagcctcactgttctcagaggggtctcgggccactgggtgtggtggtgctggaggagtcctgcccgctgtgggctctggagggcacggcagcagagcccctggcttttctaggcagagcggcacctgccccatagatcgtgccagctttggctgcaggcgctggggcctcaccgtgtttcctgggggggcccggaccccccaaggcctcgatctgaagctctgaggtctcatggatgcctgctcctggtccgataaacgagatggctgtggtggggaggagcctcaggcggcccgggaccctttggcgtccgtcgctgggaggcggagggactcagagccgaggctgtgcccaggactgtcccgggcgccgggcgatgccaacactttgtgctggttcccgccaaggggtcggcctccgggtccctgccgccaagtgcgtggcgtggtctcggcctccaggtcagacattgctgatacgggcctcccccgggaaggcagcgggatccgtggccctgtccaggggccgctcccgcctgacgtagcgcggcttccgtactgaaacgggtcagagacaggcgaggtcagagtgggacctggacagcagggacagtgcaggcctcagccctcaccggaggctctcgggagtgggcatatggcacaggcgcccggggctgtttactctgaccaggtgggaacccagatgccccctgcccctaaggcgccctcagagctccagctcgggaaagggacggcttcctcctgcccggctgtgtcctctcatttacaccctgggccc

SEQ ID NO: 45130 - DNA, 1492 bp, Homo sapien
cgggaacccttcccctccccagggacccccctccctccccagggaccccctcccctccccagggacccccttccctgccccgggaacctttcccctccccagggaccccccctccccgctccgggaaccccctcccctccttagggaccccctccccacccctccccggggtccccctgccctcctcagacgccccttcccctccccaggcgtcccgctcagcccgggcgcctttcccccataggaccgcggccaggctcgttgggaggcggcgacgaggacgcgggcccaggcgctggcggctcctccgcgcgccgcacaatgggggacgcgcagggaacgtccctcgggccgggccagggccgccgacctttgtctgcctctcgcactccctgcgccgacccggccgcccagacggaccccagcgccccaacccgctaccctcacgcctgcccccagcccctcactcaccccggcgccctccgggtttctctttcgtacaccccgccctcaggcggtggcgccgcgccccctgggacttgtagtctttcttccgccccggccccggcgccaggccccgcagctcccaaagaaaactacaactcccggcggcccgcgcgagagccgccctcgcctggtggtaccatcgcgcgcggccgtgggtggggcgccggggcggggcgcgaagcgccctgggaaatgtagtcctagaagaaccagcgcatgtctcgggtccctgacacggagggactacattcccccggattcctcgcgcgccggctgcttggcgttgccgggagacggggcggggcgtcgtcggggtctcccgggcgaccgcacaagcgtcggcgtccttagcgttccgccggtttaggcggaggcggaggcggagcgtttgggggcggccggggcggcttcggcttcatcggagaaggcggcgcggctgcaccaggtttggccgcgggcgcgcggggccagcgccctccagacccacggagcgccccgagcgcctcgcgagccgccgccaaatgcgccccaggtccgcggccggcgccagtgctgggacctcggcggccggtgtcggagcgcggcgggagagaccctgccttgggtgcgggactgggacggctcggacccagagggctcccggggcttcgcctctcggacgggtcagggctctgcggtctcaggacgctcccccgtgagtctcggcggccccggggtctgggcggcgtcgctgccccacaggccgggcgcgtgggtttttccggggctctgcctctgagccaccctcggagaaaagacagctctgtgcgtcccgcggcgcccgcagctttcggcaaacatgtttaaaggagctccccgaaggaactggggacgtccgtccgctcatcaaaggcttcaatcctgtcggtgtccccgggccctctcctagctgggccagcgcgcagggtgggggggcgctgcaggtgtcgcggccccccccaacctc

SEQ ID NO: 45131 - DNA, 1288 bp, Homo sapien
cggtgtcccagggttgccgggctggttctgcggaggcctctcccgctgctgccttctctcaggcggcctctgcgcaggtccgtcccgtgtccctctgccctaacctcctcctgcaactaggacaccagtgggacccggccagggctcatcctcacggctgcttcccacatactcacctgtctcgtagccccttctccacacacgctcgcgttgttggtactgagagtttggattctaaccatgaactctgggggcacaacctgccagaggggtcactgtgtagcccgggggaccttgcaatgtctcatccttaaaaccccaggaagagcagagctctgctgcgtgtgctcgcgggttccgcctgagagcagggtggttccgggctgtgtgttccgcctgaaagctgagttttaggagcaagcaggaaacacagaggagaaggaccaggaaccctggggagcccgggggagctacaggtggagaaaactgccctgagagtggtggggagggcaggtcacacccaccccagggaaggtcgcttgggtttacgtggagacgttgttttggggtggcggggcctgggtgtccagcatccctggtacatccctcctggtggggtcctgccaaggatgacgctccggctgggtgggcactgcagtctcaatgctcggggtccggtgtggggggctcccggtggctgcacccctcgccctgcgccctgcccgccgcctgcctgcccggcctcctcagcagatgctgggctctgaccccagcgtcaggcagaggctgggccggcggccaggacgactccgcctggggtttaatgttccacttcctccccgctgactgaccctacgcaggcactggccctactctgaggcctcccagcctcccttccacaggtctggctggggaggtggttgacgtggggagggaaagcttcccaggacgtagattttgttttcttttcctggaaaagggcggctgctcatgcttccttgctgaggtcccctcctgtgtccaagaaaacttagtggttttctctctctcctaagaaatacaggcctcaggtaaggccgggcacagcggctcacgcctgttatcccagcactttgggaggccgaggcgggcagatcacgaggtcaggagatcgagaccatcctggctaacacggtgaaaccccgtctctactaaaaatacaaaacattagctgggcgtggtggcgggcgcctgtagtcccagctactcgggaggctgaggcaggagaatggcgtgaactcgggaggcg

SEQ ID NO: 45132 - DNA, 873 bp, Homo sapien
cggccctgccctgggtccctgcgggccgcctggcacacaggagggcggttcctttcctgttggacccggtctcacttcatttgcccacgttaattggggcgcaggtgcagctctcgggcaaacaaaggtgcggtcgccaggtggacttaaccctttccctggcactggcggggcctggggggaggcagcaggaggggcggccgggtggtcagtttgaggacctggccccacgtgcctttgtgggatggtggggaccccacacccccgctggctgggctgggatggtcgggccctgggcggggcaggggctgcacctgggcctctgggccacctgcctggctcggtcgcgccccttctttggtttccagctaacgacgcggcgcccaccgagagctgggggagcccagggcggggagggcgcggccggagcgagcgccgcccgggaaacccgagccccgccaggtgcgcggggacaaaggcggtgccgggagggcgggtcctgggggtccccctgccccctctgcggtgcgttgggagctcccgtcctcctgcgcacactcagggaaagaccggaggaaccgtggcgggggtcgaggccggcgtggggtgggggcgccaggggggcgggcggggcccagagcccgggacacgcgacgaggggccggaccccgaggatgcgaggatgcggggaccctgcccccgctgggccgggttttgggggcccgggacactcagccccgccccccgcaggctctctgtggccctggggtgggagggctgcggtcgagaaccccccacgcggcccctccccggaacccgcaggctgtgcaccctctggactgaagtcacccgtcagtcccggctgggggtttc

SEQ ID NO: 45133 - DNA, 1707 bp, Homo sapien
ggttctggaccccaggggccacactgggcgggaccccgttcacaaggcgggaaggaatcctgccccaggaccacccacagaggcatcctgagctgcatccgggggaagcaggactccgaaccgggggacctgggtcctggggagcttcctggggtcagaaggtgggggtgtcaacgtcgaaccgggggacctgggtcctggggagtttcctggggtcagaaggtaggggtgtcaatgtcgaaccgggggacctgggtcctggggagcttcctggggtcagaaggtgggggtgtcaacgtcgaaccgggggacctgggtcctggggagcttcctgggttcagaaggtgggggtgtcagcatcgaaccgggggacctgggtcctggggagcttcctgaggtcagaaggtgggggtgtcagcatcgaaccgggggacctgggtcctggggagcttcctggggtcagaaggtgggggtgtcagcatcgaaccgggggacctgggtcctggggagcttcctggggtcagaaggtgggggtgtcagcatcgaaccgggggacctgggtcctggggagcttcctggggtcagaaggtgggggtgtcagcatcgaaccgggggacctgggtcctggggagcttcctggggtcagaaggtgggggtgtcagcatcgaaccgggggacctgggtcctggggagcttcctggggtcagaaggtgggggtgtcagcatcgaaccgggggacctgggtcatggggagcttcctggggtcagaaggtgggggtgtcaacgtcgaaccggggggcctgggtcctggggagcttcctggggtcagaaggtaggggtgtcaacgtcgaaccgggggacctgggtcctggggagcttcctgggttcagaaggtgggggtgtcagcatcgaaccgggggacctgggtcctggggagcttcctgaggtcagaaggtgggggtgtcagcatcgaaccgggggacctgggtcctggggagcttcctggggtcagaaggtgggggtgtcagcatcgaaccgggggacctgggtcctggggagcttcctgggttcagaaggtgggggtgtcagcatcgaaccgggggacctgggtcctggggagcttcctggggtcagaaggtgggggtgtcagcatcgaaccgggggacctgggtcctggggagcttcctggggtcagaaggtgggggtgtcagcatcgaaccgggggacctgggtcatggggagcttcctggggtcagaaggtgggggtgtcaacgtcgaaccggggggcctgggtcctggggagcttcctggggtcagaaggtaggggtgtcaacgtcgaaccgggggacctgggtcctggggagcttcctggggtcagaaggtgggggtgtcaacgtcgaaccgggggacctgggtcctggggagcttcctggggtcagaaggtgggggtgtcaacgtcgaaccgggggacctgggtcctggggagcttcctgggttcagaaggtgggggtgtcagcatcgaaccgggggacctgggtcctggggagcttcctgggttcagaaggtgggggtgtcagcatcgaaccggggaacctgggtcctggggagcttcctggggtcagaaggtgggggtgtcaacgtcgaaccgggggacctgggtcctggggagcttcctggggtcagaaggtgggggtgtcaacgtcgaac

SEQ ID NO: 45134 - DNA, 1251 bp, Homo sapien
cgccccttctcccatcacacgcagccccttgagaacagccagcacctgcctcccaggtccgggcaagcagcctcccctctcgacggccccgggcagccccatcaccctcggcggctgcccaggcccaggcctgtttccggccctcctctgagcacctggagaggaggaagtgcgtcttctctccggtgcctctgagagacaagcctactccccccgggctgggtggcccagggcacagttagacccgggagtggaaaaggcggtggcggttttcttgctgttgtcccggcagcgtctttggtgacactttcccgcctttggagaccaattacccggcagaggcccagtggcctcattaactctgctgcggcgtcgagaaagggggaaggagccagcccacgggcagggcagggcggctgcagactctcccgcagctcaggggcctggagaaacctggccacacctggcccagctgggtcaggcctctgccaacaggagcccagggccccagcgctcccctccctgccagggaaacagcccataacgacagcctttcctggagcctgggttgcatcagccgagccgccagccacagggccccagcaacggcacctgggcccggggcctggcctgccggggacactcggctgtgcgcacctcgaggggctctacagcctgtggggccgcgcctgcctctcggggcttccgggcgattcctccttctcctccgtggtgtgtgctgtgcagacggggaccgggccaggccagacgccggatccagagcagcttcccagacaggccacccacccctccgaggcctccctcagtcccctggcgggagtccccggccttccgggcctctctcccctcccttcccacccccaggaggggagaggactgaggcctggggtcactgccgcacctgcgctctgagacctgcactcgcccaggccggagtccccacgaggcaggaaccctggcatgcggccggcagtgcccacagcacccagtcagccgggaggggtctcaccccacagccccccgctcctcccctccacacccaaccacagtccctcctggctgacaccgtggcccctcctggcctgtgctccccgggaacctcagtcagtgtcacttgaactccagcaccggacctggccccgtccatccagcctctgccccgagagccccgcccgtatctccagaggacacgccctgccaggggacaggcgggagcagctgagggccgcc

SEQ ID NO: 45135 - DNA, 1261 bp, Homo sapien
ggggcaggaagctcacccttgcaggtctccccgcgccaacggacgccctgaggcctgaccctggctgaggcagagcacccagctccgtggaccgggacggacgggctcaggtgccccccattccttccgaagccggttcacacccacccgggcctggcacaggggaggcgctggctgcagggtcggggcgggagcagcctcaacccggctcctgggccgcggccgcagcagtggaacctgtcggggcaggtaagggcgggcagcggggaggctgaggcgcagggggaggcggctccctgcaggggggccctcgccagcccccgccgtggccgacgtggggcaggggcgcaggtgacagatgggctgtcgccagcctggccagcgtccaggggagctccggtcactgcagacacaggctggagcgggtccttcccccccccagggaaaggtgggcccctgcgcagatgcggctgggtttcgggtgtggagccatcttggacccacgggctgcgtcttccgggcacgggcacagtgtgtgggctccaggcatggggtgccctcagggcagggcctgggcagagggcaggctccgagaggggtcacgttcttgccgcctacctgacagcaggccttctagaaagttctctccagaagcagccaccgccgtcctgaggcactttgtgcggagacgggaagctgtcgcctcagaggtgggtgcgtagaagggtttggccgggtgcgaggatgaccgcgtctcccttgggctctggagtctgcggtgggaagggcttggtttcagcaccctctggtcagaggccggccgagcccatgggcggtgaggttggtgcctggggtcgtggctggtctggtacaggtggggctcagcccggagaagctggagccggttcccaggccccgcgctatgactggggtgggggcaacgtctctcgtgaggttttttacttaaatgtgaaacggctcagtacggtggccgcagccgggaacaaggtccgacccaccgaggcccagccttgaacttgccgcgggggcacctgaacacggttttacagcccggatcactggctttcttgaagtttgggaactgattgatcatggtggcgggaggtaaggttcattgttcttgatgaacaaaattcttagggcgtgaagagccgatgctttaattaaccccccgggagcgtctcaggcctccccccgggagcgtctcaggccccgtttacgctgagtgtctggggaaaga

SEQ ID NO: 45136 - DNA, 878 bp, Homo sapien
cgcacccctggatccctggaggagctggtgtgttctctgtggggcgggtggacgtggcccggacacacgggccgtgctcacagccggcctgcgagggctgcaaatccacgcccgccgtgtgggtgaaatggcggctttgcctcccagacgcgtagctccggcgacgcagagggaagaacctgagtgcccgccaggccgagctccgcaccccaccccccggcagcctctgactcccggctcggctcccgcggtcggggagggttggatttcacactttgttctcgaggccgcaccattgattaagcccgtcgggcaggttaaccaacaagttaggttttcacgccgggatcacattcctcgccgggcgctcccaccccaccccagcctgtgcaggtgggacccggccaggcaggcgggcagggcggccaggtgcgccgaggggcgcctccacggggagtgtgctccgcagagaaccccttgctggggcggctctgggcctcctgactcactcctggattttcccaagctgagtctggccccgcggtgatgattaacccaacacctcaaccggcaccgccacgctagctccacttcccggcgacggttgacaagaaagcgccgcgtggggctctcggaaaacagggaaggtccgttttcgcttttcatttcttgacctgtggccacggtaagactcggccgcctgcccacccgactccttgcccctcacccctgtgccaggcacaaggccctgcgaaatccttggtcccccagctgagcctgccggcccaggccaccatctccccacccagccctggagccagggtcggcctctcctgctagctgctcgttggctttacagcttctgcactcaggaggcg

SEQ ID NO: 45137 - DNA, 1323 bp, Homo sapien
ggtggggctcacccgggcccctgccctccggcgatgctgtcctcagtgccccaggaggacgaggccccccagctactgagcttcccagcgagtcccatgcaaccctcagccgggcggcccccggacccagctcgggcagccgtggccatcttactgggcagcattggatggagtcaggtctctaatactgcctggtaatgatgacggcggagccctgcacgcagcgaccggccgaccccgtcccggcccccagggcctcccgccgagccccacactcccctcccacacagcccgctcaccggaccccaccccgtccgggccagatggctctggggagagtgacggggggacgtgaccttcggaagggggctggggcgccccccaccagcatctcagagaccccggaatgcaaggcctcctgcagctgcacccagggcgccccacagtgatctggggattaggacgctcaggtgtccgggccctgcccacagcgcctgggcgggagctgctgtcacacccagcaggtgcgggccgagcaggacccaacagagggctcaggagggcaaggcccaaccgggagccacgtggaacccagaggaagccgccccacccagcttggccacagccatcttccctcctgccggacagggtgggccggccaccgagcagaccagtgcccccgccttggtcccgggtcagcagccccagggtccccttgccctggaggaagcagggagggtgggcctgtgtgcagtctcagggcccccaagcccctctccgccagccctgtccggtcccggcaccacccctggctgctcaccgctccggttcttccctgggcttccacagcagcccctgcctgcctggcgggaccccacgtccctcccgggcccctgtgagcatcttaccggacagtgctggatttcccagcttgactctaacactgtctggtaacgatgttcaaaggtgacccgccgctcgccggggacaccaccgaggcacatccggagctcctactccagggatgggctggggcggagggccgagcggggccagcagacgggtgagggcggagggccgagcggggccagcagacgggtgagggcggagggccgagcggggccagcagacgggtgagggcggagggctgagcgggcggcagagggcctgtgtcagctccgaagtccagcccccaggggaggggccggcctctgccgggggtgcccccggggtcactcacgcccaggctgggtctgacaccttgaggaccccttggtgcctccacaggtggcctggagggcatcctgctccccctcccggagc

SEQ ID NO: 45138 - DNA, 561 bp, Homo sapien
cgcaccagacctggtgctcgagaccttccggaagagcctgcgcggccagaagatgttgcctctgctgtcccagcgccgcttcgtgctcctgcacaacggtgaggccgacccgcggccgcacctggggggctcgtgcagcctccgccgctggccgcccctgcccacccgccaggccaagtcctccgggccacccatgccgcatgccccagaccagccgggcgcccgcaggcctgcgccacctcccttggtgccgcagcgtccccggccacccggccccgacctggacagcgcccacgatggggagccccaggccccgggcacggagcagtcgggcacaggcaacaggcacccggcgcaagagccttccccggggacagccaaggaggaacgcgaggagcctgagaacgcgaggccctaggggcagccacccgcgcccagcgccccgcgccccgcgccccagccgtgctgcctgccctcagggacctataaagcccactttgctacaaacacagtctctgcagcagagtcctgccacctcagcgcccctgagcccatgcccac

SEQ ID NO: 45139 - DNA, 1002 bp, Homo sapien
ggcacagatcccagcagctggggcagccggggaccacctgtccctcaaggacctccccacctgtcctggcgctgggaaaggctgtgtccagctctgtctgcgaaggggcccccgccataggtgtctctgtcagctgcggggggttcccgcagggccaagtccagatctcagtggagggtggggagggggctggctgggaggggaggctccgcagcggccggaagcgcttctgggaacagaggtggcctccggcccttttctcaaaagtccgaccccagcgggaggttggggcggctgcggttttccgggcagatggaggccgccctgtgcgagtggctcgggcttccagggggagcagagaggggcccctccccgtggagccgagaccactgcgccccgagtgggagggggcggcggcctctccgccgcgaccccggccccttctccgcacccggccccgcccgaccctccgcgcccttgggacccccccctccatggcgggttcgcgctggcctcggcctcccccactgagacccctggaggcgcccccgcccccacgcgcgagaacccgcccgcctcccccgggctccgcgacgcacgctggggcccccgccaggcccggagggtcgcgctccaggtaaagcgcgcggggcgggcccgggaggagccggagactccggagaccccgcccagagcccgctccgccgcccgcggaatcccccgcccgtccgctgtgcgtcagcccggccgcccccgcgctgacgtttccgcgccgaggcccacgcgaggccgcccacgaggagtttccgcgctgagtcagccccgcgggacccgcgctacgcgggccgccggtgttttctggggccggtgcgggacagccccggtgtggggggcgcgtggggagagccggggccaggcggggaggatccgggctgcaggcaggagtgcgcggggcagggcccgaccgctcagcctccccggggctcacacgggaggagcgcg

SEQ ID NO: 45140 - DNA, 823 bp, Homo sapien
cgcccagcaggacctggaacagccgtcctccacctccagaccccagacccctcttgagggcgctcccacctggctcacccctgctcccggccggggccactggctggagctggcacacctccgcctccctctgggatcctgcctccctccggaaggctcccgctgctggcggctctgtgcccaccctccttagacctcagcaacgccggtctgagcacgggaaggggggcgcccacccatcccggcttccgcgggacgccttggccggtccgcgttaagtaaacgcggtttacttacccgggtaatcgcggcagcagcgcgtcgtgtgaacccggcagcagcgcgcgtccgttcccgtcccaagcaggaggcgcccagggccgcacccgggacccccggtggggcgctgacccaggctgagcgcgcacagcagcgccaggccgcacagggcccgaaacgcgcccatcgccccgtgctgtgccatgctcgggtttcaagagcccacagccagttggacacgccccgtccccgtcctcacccgccctgcccggaggtggctgggaccgttcatgacctgagaatcccgacccaggtgaagtgcgtgtgaggagggggtgtagacactgcggacacagcccggtcccccgcaggtcgccggcaggggcggggaaaccaggctggcggggatcagaaaggttttctatgcaaagtctgcggccacattggtgtccccagtgcagggggcggcgtttatagcaccttgtcccatgggggccccttggagggcgggggtcagccaatcactcctccatcccactgcctc

SEQ ID NO: 45141 - DNA, 388 bp, Homo sapien
gcggccctgggaggggccgggcccagaggttccggccgcgatgccgtcagcgccttcggcagagtgactgaagcgagatttcgttctcagaagtgagatgccacgatttcgagggaccagggaggaggcggcgccgcggggccacagcccagccccgcgccccgaccgcgtcacagccaaagccccgccggggtgcgcgctgcagaggggacacgccgctcatcaactggggcagccgcggtcggtcggccggtggcgggcggcagggaagaggtggggtccgggacagccacggagcccggagtcacccgcgaggccgccccggtggtgcgtggggggcggcgcggggcgcggccgggcgctcaaaactcctcgtgcacgctgcgcg

SEQ ID NO: 45142 - DNA, 2178 bp, Homo sapien
cgcctctgagccagacatcaagggctccacacagccgacttcacatctccaaatcctactaactggggatgagggtccacgcggttcagaagcggaagcgcaggcgcagggaagcggggcagcttgtccaaggtcgcctcgccgataaacgcgagtccaaccagaccccttgggcctccgtttcccggtggcattcgtaggttttggccagtaggagaccagacgtgccggcggccggggaggccagcgtcgtcggcctgtccctgcccccgggaaccccgggagccccggtggcggcggagtctcgccagggctcaaggccgagcggacggacgatgccccagcccaaggcgggaggcggcggcggcctccagacccgccctcgccgtccggccggcgtacacttggccccgcggcctgcagcggccgtcccgggcccctcactcaccggtctgcctccccgcgctcgggatccgaggaccggagcgaagcgtcagtgacgccgccaacgggcccggatcaggccactgccatctttcttgcgggcgggggcggtgcgaacgggcgcgacctcacggaggggacgccggcgccaccatctctcctccgggcggaagcggtcgcggggccgctccgaggttgaccaatgacaagggtgcccgaggccacgtgacggccgccgattggccgccggcctccgagcgccccggggctcggcgtctgcggaaggccccggcgcgctcccaggagcgccgtgcgcacgcgcaccgccccgagccggcggcgcctgcgcactcgcgagtccggcctgggccgccggcccggcgcgggcgccatgaagctgctgcggcgggcgtggcggcggcgggcggcgctaggcctgggcacgctggcgctgtgcggggcggcgctgctctacctggcgcgctgcgcggccgagcccggggaccccagggcgatgtcgggccgcagcccgcctccccccgcgcccgcgcgcgccgccgccttcctggcagtgctggtggccagcgcgccccgcgccgccgagcgccgcagcgtgatccgcagcacgtggcttgcgcggcgcggggccccgggcgacgtgtgggcgcgctttgccgtgggcacggccggcctgggcgccgaggagcggcgcgccctggagcgggagcaggcgcggcacggggacctgctgctgctgcccgcgctgcgcgacgcctacgaaaacctcacggccaaggtgctggccatgctggcctggctggacgagcacgtggccttcgagttcgtgctcaaggcggacgacgactccttcgcgcggctggacgcgctgctggccgagctgcgcgcccgcgagcccgcgcgccgccgccgcctctactggggcttcttctcgggccgcggccgcgtcaagccgggggggcgctggcgcgaggccgcctggcaactctgcgactactacctgccctacgcgctgggcggcggctacgtgctctcggccgacctggtgcactacctgcgcctcagccgcgactacctgcgcgcctggcacagcgaggacgtgtctctgggcgcctggctggcgccggtggacgtccagcgggagcacgacccgcgcttcgacaccgaataccggtcccgcggctgcagcaaccagtacctggtgacgcacaagcagagcctggaggacatgctggagaagcacgcgacgctggcgcgcgagggccgcctgtgcaagcgcgaggtgcagctgcgcctgtcctacgtgtacgactggtccgcgccgccctcgcagtgctgccagagaagggagggcatcccctgagccgccgcggcccggccctccgggacacctgcttcacccggcggcgccttggggcaggtgccgagcgggcgcactacgcccgggccccaaggcccccgtcccgcagccacgcttgtggtcgctgcgtcccggtctgcgtttgggagacccctgggggttgccggggcagcgcgccgtgtccaggtggaggtgcccgttcctggacctcagcgagcctgagccgggcccggccgcacgctgacccccgtgctgtccccgaccggctcacggggctgggctccgatcttccgtgtctcttatcagtggcgtttctcacgtctgcgtctcagatctaacgtggtttcacatcaatc

SEQ ID NO: 45143 - DNA, 1660 bp, Homo sapien
cgggggctgccgcctggagcgggggctgaggtcactcacgtgtggcgctggcacagggactcaatacagatgagaacacacaccacgtcccgggcccgcagccgggccttgccctgcagctcactgtggtctgcggagagagccctggggagggtggtgcatggggggcggggtgggggctggtggggaggggcttcagggcacacatcccaggacaggcccaggagtggctgctggggctggggagggggcgcctgaggccaggcgtgcagcagggaccccatgcccagtccaaggccccccatggggcaggggataggtccctaacaggacccgcacccggggccggcgatgccaggcgcccccagaaagctcagccccagccccgtcacagcacacggcactgccccatccggctcacccacgtgcagactggcagagaactggaagatgccggacacgggggccgtgaaccgacccgaggccaggctcagaccggagcctcgcaggaaggcaccttgggcagcaggctgtgaggggcagtgggtgagcggccagcgcagggcctggcccccaccccacagaccccgcctggggaaggtgcctgcaaccgacagcccctcactcggagcagctctcccgggaccctcacgctcactgtgggcaccagcaggactgaccctcgagtccacacccaggagggtctccctgcctcccggctaccggggacccacgctccgtctgggcataaagtgtgatctgggcccccagggcctcccaaccctgacccgaggcagcccctcgccctccgagccccgcccccagcccccaacccacatgctgccccatgagtgtcaggcggtgtgtgtggtcccgtcttgcctgtggggccccacccaacaccccgctctaagctcccggctccactcacagcctggaaaccatgcagctccaccagcgtccgcttgtccacccggcggggaccctgcagccggcagtgaaaggcctcgcccaccagccgcaggcccgccccctggggcagcagcgggtccagaagccctgagaaccggcgctccgtggcctctgtggggaggagggcacaggcggccagcagggtcagcacagggcccaggcacgtctggtctctgggcagtgcagggcggctgacctttcagcagctcctgaaactcgtgaagcagagtctccgcggtcacttctgcacctggaggtcctgggggaccgaagagatcccgctggggggagagagaagcaggtgaggggcccagtgggacccggtgggagctaccaccacaccctgtccggggctcagaccctgcagcagcccgggcggggctcaccggcttcttgtccctgcttccgcaccgcttccttaaggcgccgtcgtccggccgccggacaaagttcagccatgtcatgtgggcgtcggagaactcaggtcctgaggcctgggatggctgaagggacgggacggggctagcgcactgaggctgcaccctgcagagagctgggaccccagggcagcggggagcactcagggcagaaccagggaaggcatcgccggccaggagaaggacccacggccgcccttgggggagtcagaaccctgacgtcccaatgccaccagcagggcaggcatgcg

SEQ ID NO: 45144 - DNA, 1078 bp, Homo sapien
cggcctgactggggccccaggacttaacccgcaagagggggtgctagctacacaggacccccagaaagcacaagggacaggctcgccatggcgtctccagccgcaggagtcatggggcgctggactcccaaggggtctggtgaaccatccagcaagcagccggaaccaccccacccccgcccccaaatcagcaattaacctaatagcaacaggttcctcagagcgcggcaggcccacgcttcaaagggttaactgcggcccccaaccgcgggaagcccccttcacccacccaccccaggccagctgggggccaggtctccgctgcagaggaggagagggcttcccagaggccggcctggctgggctgcagcagattctcaaggcgggaccgtggccgaggcctcgaaaagggcgacccggaggcagagccggcagggacagagcctgctgggggaggacgccccagagccccagctccgaagctgccccgcgagggcccacgtgcgtcccggccgcgtaccttgggggcctcgggcagcccctcgcgggaggacgcgctggcggtggcgttggggggatctgcgcgctggccaggctgctgcgtcctctgtgcctcccgccgggccccgacgcccccgaggagcacgagctgcggcccgaggaggaccacgaccgcggcccaggcccagcgccgcatggctccgtcccgaggcggctcagcgcggcgagtctcggcgccagggcgcagtcatggggacggccggcgctcagagcccccgcgcgggggcgaggcccaggggcgcgcccggcctccgccgctgcatgtctgcgcggacctgcccggaacggcggcgcgacggcgctcaggtccccccggggtcccgctccagcccccgctcccagcccccgtcctctctggcctcctcactccgccgcccagtaaatcctcccctcgcctcctcctccccagacctcgcaggctccagggtgggggctcacactcggacgatcagccagccgcccgggcgccccgacggccagggacggagacggggcggagacccccactgaccccggc

SEQ ID NO: 45145 - DNA, 1129 bp, Homo sapien
cggccgagtggtcaagtccccgacatgaccctgacccggagctccgggagcccgccgtaaccgacctcgggttccgcgcaggcaggctcgggccggggccccgcgggcggcgggcgcgaacggagaagcgtcgcgcagggtccccagcagccccgggccgccgctgtggccggctccggcaggggggacgagcgggcccgaggacccggcgcaggcctgcgagcgcgctcacctctccctgtcgctgcgcgtgggccgccgccgcgctcaggctcgccgtagtcgaggccggagcagggtgcggaaaagcggggcccgcgcccgaaacagccgcaccgccccgggattgggcccaccgaacccgccgcagcgccgccgccgccgcctcagcctccaagatggccgctcgcggggcggaaccagcctagcttctgcttccggtgcgcggtccggggcggtgaggagggagggggagggctggccgctctaggcagactggcggaccgcgcccacgactctctgtcgccgtcgaccccggggtgggggatggggcggggggcggggcggcgcttgcgcactggcgggcggctccgggcaccgttagtgggcgcgagagccccagaccccgaagccgcgcgcttccctccccatgtgccacggcccagggcggcaggcccggctgagggcgaccccggtggagaaagaaccccgaccctcccgcctcccggctcccgccttgtcctccgctcccacgccccacccggcccttaggggaggcgcggcgcggcccgggcatggagcgtcccgggcccctggaggctcagtggagggttgggctccagggagctcagagctctctcgttcagggacccgagagtgacacgcgtggcatctctttgcaacccacgtccgcgccgcagcaccctcccctgcaggtgcctgcccagccccgggatgcccctgacctccccttggacagactgcagaaagcgcggggcgctgcgtcctctccacctctctctgaccccagacacattgggagagagcggtaggtggcggggcgctggggtgggacgctgggggcaggcgcgcagcccaccgcctccctgagaggccgctgaggacagcg

SEQ ID NO: 45146 - DNA, 1458 bp, Homo sapien
cgtgaggcttcaagagactcagtgtggggccctcgctctcctcctgggcgagcagggccgcggcgccccagcactggggctgccaggtatcgacccgcgggtcacacgcagggccgcggccgggtgggcgccagggacttcggggcatgcggggcgtcgggccgggcggggtggcagctgcccggcctgcccggccctagctctcttccaggtggaggctgatgaactcctggatacacctgcggaactggagctccgtggggctgcccgccagggcgcccgggggaccaggggcagcctcggcctcgcgcatttcctccgccatgcgcgccagacggagcctacggggaggcacagcgtgagacgcccctgccctggaggccccgcccctgccctggaggccccgcccctgccctggaggccccgcccagccccgagggcccggccgcgctcacagtgtcacgatgtcagcgttggccgcctgcactgcgatggccaacgggtcccgctgctcttggtccagggcgtgctggtccgcgccccgcttcaggaacaggcaaacctggctgaggggcgaggtcggaggggcgtgtcggggcggggcggggcggggcgagtgtggtcgcgggggcgtggccggatagggcatggcggacagggcgtagccgggccggggtaggcgtggtcggggcacagggcggggcgtgggttgcgcgtctcacccggtgcggcccagcagcgtggcgtggtgcaggggcgcccggccccggctgtctctttggttcacgtccgctccgttttgcagcaggaactcacagacgatcaaggagccctggggagccggggcaactcagacggagccacggcaccggcccctctccgcgcctctgcaccctgaccccggccttgggcgcccccagccgggaccgaacgtggtccccaccgcggacaggcgacccttgtgtgggcgccacagaagatgcaaacgcgactgtgcacctgtgtcctgcgcgcagcccccgtggctcgctcacccctagcacggcctgcaccagcggcgtcttgccctcatcctccgcgtccgcccagttgacctcggccccgtgggccagcgccgccgccagcgcaggaaggtcgcgggcacgcgctgcgcggtgcgccaagagccccgggtgcagctcgcgcacgtccgccaggccccaggcctcggcctcagtgtccccgtctgcctcaccgctggactcctccgactctgcaccctctgtggggagggggcggtcagggaaagcaacccccggggctgcccaggggctgggcaggggcctcgggcgagggcaagacgccacccaccctcctcagtgacgctgtccaccacagagcccgagccgaaagccaggacgtccgagctgccatccgagctgcccccaaggccactgtcgctactcagacctgcaggtc

SEQ ID NO: 45147 - DNA, 1675 bp, Homo sapien
cgtgtgtggggcaggggccatccccagtggcacgtaggtgtgtgcaccggcacggggcaggggccatccccagtggcacgtgtgtgtgtgcacaggcgcggggcaggggccatccccagtggcacgtgtgtgtgtgcacaggcgcggggcaggggccatccccggtggcacatgtgtgcacgggcttggggcaggggccatccccggtggcacgtgtgtgtgtgcacaggcgcggggcaggggccatccccggtggcacgtgtgtgtgtgcacgggcttggggcaggggccatccccggtggcacgtgtgtgtgtgcacaggcacggggcaggggccatccccagtggcacgtgtgtgtgtgcacaggcgcggggcaggggccatccccggtggcacatgtgtgcacgggcttggggcaggggccatccccggtggcacgtgtgtgtgtgcacaggcgcggggcaggggccatccccggtggcacgtgtgtgtgtgcacgggcttggggcaggggccatccccggtggcacgtgtgtgtgtgcacaggcacggggcaggggccatccccagtggcacgtgtgtgtgtgcacaggcgcggggcaggggccatccccggtggcacgtgtgcacgggcacggggcaggggccatccccggtggcacgtgtgtgtgtgcacaggcgcggggcaggggccatccccggtggcacgtgtgtgtgcacgggcttggggcaggggcaccaagggccacacctcgctatagcaactgtcagggctctcgcggtaggcggaggcgatgctggcctgcacagcctggacccaggcttgccgcagcttctcggagtcagcctgcagcatgcagctcctgcaggcagtggaggggcgggcgtcagctccggtgggcaggtacgccccccgccccaccctgggctgggcctcctcacttggtgggtgacagcacctcgaagcagaacctccgctcgatgtcctcacacggcttcacagagcacaggcggaggtcatccaccaccacggtgagggcatcctgtgggcggcaccgctgtggcccctgccctcagccaccacccggccccgaccacccacttcctgcttcaccttggagacccggaggccgactgcctgagccccaagccccgtgtccagctctctgctccctgactgttccggctccggcgtccactagtgccccggccctgtgctaaccccaactgaccagtctgccctgtggcccaggtggggcgtccagccatcagggccccagccccaggcccagggcacaccttgagcttcttctggtagaccagctggctgttctgaatggagaaccagcgcctaggtgggtggggggatgtggggagtcaggcggggcccatcccagggctgctgtgacccctgcccccacctgaggaccccacccccgcctgaggaccccacccccgcctaaggaccccgcccccacctgaggaaggcctctcaccggttccatgtcttgaaagcgttgctggccctcttgaagaggtagccctccatcaccaccccactgggcgcgtccacgtcaaactccactttggactcatcgtaggagaagtcctggggggatggaacccgccccctcagtgcccaccccaggggccctgctaccctccgtgctttcc

SEQ ID NO: 45148 - DNA, 2784 bp, Homo sapien
cgccgctcttctcggccgccacccctccaagcccctgggtcattcaaaccacttcacgtttccaagcaccctaccccaggccttaaacgcggctccagctgcctgttccccacgcgctgctctggacacaggatcaagtcagagaccaggggccgacgcccccacggacccagacgaccctggccagagctggactgcagggcccgggaggggctcagcccagtggaggtgcagacacagagcgggggcggacggtcccgaggtgcccacggctgcccacgcgcacgccctccacccggggcggccgcacagggcaggagcgtcttttgttccaacccccggggcatggcggggcggggccgccgctttgtccgaggccggtcctccagcccctccccggcggccgcggcccggcccggcgctgacctccccaccccgccgccgggcacaaaggcgacagcgacgcccccggcctgcgcccaccccggcggccccgggcggcgcacctgaagcgcggggagtccttgacgcactcctcgaactccacggtcatggctgcggcggccgcggcgctcactggcacgaggaccgcggcgccgagcggcagccgcgccggcccggaccgctcgtcccgcccgcgccgcctcggcgcccgcccgccccggaatgaggccgccgcgccgcgccccgccccgcctgtcaccgccggggagcgtcgccaaagtcagccgcccgcgcgcaccgcccgctgtcactgccggggagcgtcgccaaggtccgccgcccgcgcgcgccgcccgctgtcaccgccggggagcgtcgccaaacgcctctcgcagcgtccagggaccaccccggtccggaagtgaggcggggcctgccacggccgtctccggggacagtcggtggaaatgtggggcgcggggagggcgcggggagggcgcgggcccgcccgctccaaccatcccggccgttgcgcaactcagggcgtttgcaaaaaccacgtctgggaggacttggccgcaacgcggcgaacgggcgcgctcggggagtgtgggcggcggcgaatgaatgagcgagtgaacgaatgcacgcccgcgagagcgcggggtgaccgcgtggttggtgcgcgcctcccggggcgccgcgatagaggtagagcgcctgcgctcggcggcgggccggcactttgcagccgctccctaagcccggccccgcctccgctccccgactctggccgccgtggcgcggtgccaccgcgcaggcgcaagagcggccggggccgggggggagggggggggggcgtgaccaggccgcgtccgcgcgcgcgcaggattcctgcgctggaggccgcctctgacgccaccggctgggctccgccatgagttcggcgccggcctcaggctccgtgcgcgcgcgctatcttgtgtacttccagtacgtgggcaccgactttaagtaggtttcccaggcgcagcggcgggcgccacgtgggcccgggcggaggcgggaaggagggcgcgggcgggcaggcggatgtctctggacgcgggttccaaacgttcggggaaggaagcggccctggcctcagacggcggcggagaccccagggcagggcgcccccggtaacctccgcccgcttctgcccgcagcggggtcgcggccgtcaggggcactcagcgcgccgtcggggtccagaactacctggaggtgcgctcagccggtcacgggacgcccggtgaggggtaagggggaggctcccgcccgcgcgtccccggggtccggcctcgctcacccgcccgccccgcggctcggtcctgcaggaggccgccgagcggctgaattccgtggagccggtcaggttcaccatctccagccgcacggacgccggggtccacgccctgagcaacgcggcgcacctggacgtccagcgccgctcaggccggccgcccttcccgcccgaggtcctggccgaggccctcaacacacacctgcggcacccggccatcaggtgagcccgcgacctaagcagccctggggctgtgccttcccgactccatctgtcgcgggcggaggctggagatctggacagacttccttgtctggtcggagctcgagggggaaggagagccaatgtgacaccgcgggcgggcggggtcgttcctccggtgagctttacctgccgccatagggtcctgcgggccttccgagtgcccagcgacttccacgctcgtcacgcagccacgtcccggacctacctgtaccgcctggccactggctgtcaccggcgtgatgagctgccggtgtttgaacgcaacctatgctggactctcccggcagagtgagtgtggccctgacagcggggagggggcgggcaggccggccccaccctcctgacggtcaccctggtccctgaagctgcctggatatggtcgccatgcaggaagccgcccagcacctcctcggcacacacgacttcagcgccttccagtccgctggcagcccggtgccgagccccgtgcgaacgctgcgccgggtctccgtttccccaggccaagccagccccttggtcacccccgaggagagcaggtgaggaagggcccctgggctgtggccctgccctcaagtcacgtgctgattttagctccagcacctcccccagttttaaggcaaggtgaggcgggaggcaggcagccgggagtcctcaggacctggacagctggaggggattcgcccggacgccccccagcctccagctgtgccctccccccaggctggggagcg

SEQ ID NO: 45149 - DNA, 1197 bp, Homo sapien
ctggggggctggggggctgagggactgaggggctgaggggctgggaggctgagaggctggggagctggggggctgagggtctgcggggctgaggggctggggggctggggggctgaggggctggggggctgaggggctgggaggctgagaggctggggagctggggggctgagggtctgcggggctgaggggctaagggactgaagggctggtagggctggaggcggcagcgcgcggcacggggaggtcaaggcaccgacgaaagcgcacagcgagcgcgaaggccccgcggccccatctgcgacgtcccctcacggccgcctgaacctcggggctcgcgttctcgcgtcactgccggaggcccggggtgcagggactaggccgcctctcggctcccaccagggcccgcgcggggaggagaccggaggacgcccgcggcgcgcacctggctccacgagaaacgggagggagcggggcgcccagcccgcccggagccgcatacggagcccaccccacagccctcccggcggctcccactcacccaagggcgtgactctgatctcaggcatcgtctccgccgcgctcccggacccgcgaggcccgcctgcggtgatgcactgcgcaggcgcaaccacctcgctgcaacttccggtgcgctagccggaaacgcgggtcggggcgccgggcctcctgattgggcagcatccaaccaatcagggcggcgggcgagggcggggcgagggcggggcggtgggcggggacggggcccgcacggcggctacggcctaggtgagcggctcggactcggcggccgcacctgcccaacccaacccgcacggtccggaagtcgccgaggggccgggagcgggaggggacgtcgtcctagagggccggagcgggcgggcggccgaggacccggctcccgcgcaggacggagccgtggctcaggtcggcccctccccaacaccaccccgggcctccgccccttcctgggcctctcggtggagcagggacccgaaccggtgcccatccagtccggtgccatctgaagcccccttcccaggtgagactcgtagcgctcgctcgacagggtctggtcccacccacaaggcctggggcgccgtggggccccgtctcctgctggccccccagcctgctgtcagcccccgtgctctgtgctcaggccgccctcgcgcc

SEQ ID NO: 45150 - DNA, 794 bp, Homo sapien
ctcccctggcccgagtcccatatgtggcatctgcctcccgactgcctgtccccaccagctttgctgcccgtttccagatgggtgtgagcccccgcaggctgggcagcgtcccctgcaccccaggcgggctgccccaggcctgggcgaggactcgagccccgctcccttccacaggtttctgaacagcctgggcaccatcttctcattcatctccaaggacgtggtctccaagctgcggatcatggagcgcctcaggggcggcccgcagagcgagcactaccgcagcctgcaggccatggtggcccacgagctgagcaaccggctggtggacctggagcgccgctcccaccacccggagtctggctgccggacggtgctgcgcctgcaccgcgccctgcactggctgcagctgttcctggagggcctgcgtaccagccccgaggacgcacgcacctccgcgctctgcgccgactcctacaacgcctcgctggccgcctaccacccctgggtcgtgcgccgcgccgtcaccgtggccttctgcacgctgcccacacgcgaggtcttcctggaggccatgaacgtggggcccccggagcaggccgtgcagatgctaggcgaggccctccccttcatccagcgtgtctacaacgtctcccagaagctctacgccgagcactccctgctggacctgccctaggggcgggaagccagggccgcaccggctttcctgctgcagatctgggctgcggtggccagggccgtgagtcccgtggcagagccttctgggcgctgcg

SEQ ID NO: 45151 - DNA, 1173 bp, Homo sapien
cggcatggcccagatgggcacggtgcttggcttcctccagaggggtgcccagctgcacgagttcccccagtacgtgaagacgcacctggccctggccaccgacccggccttctgctctgccctgggcgagagggagcagggtctggaggaggacgtggtgggccagcgctgcccgcagtgtgactgcatcacgctgcagaacgtgagcgcagggctaaatcaccaccagacgttctctgtctacgcagctgtgtatagcgtggcccaggccctgcacaacactcttcagtgcaacgcctcaggctgccccgcgcaggaccccgtgaagccctggcaggtgagcccgggagatgggggtgtgctgtcctctgcatgtgcccaggccaccaggcacggccaccacgcctgagctggaggtggctggcggctcagccccgtcccccgcccgcagctcctggagaacatgtacaacctgaccttccacgtgggcgggctgccgctgcggttcgacagcagcggaaacgtggacatggagtacgacctgaagctgtgggtgtggcagggctcagtgcccaggctccacgacgtgggcaggttcaacggcagcctcaggacagagcgcctgaagatccgctggcacacgtctgacaaccaggtgaggtgagggtgggtgtgccaggcgtgcccgtggtagcccccgcggcagggcgcagcctgggggtgggggccgttccagtctcccgtgggcatgcccagccgagcagagccagaccccaggcctgtgcgcagaagcccgtgtcccggtgctcgcggcagtgccaggagggccaggtgcgccgggtcaaggggttccactcctgctgctacgactgtgtggactgcgaggcgggcagctaccggcaaaacccaggtgagccgccttcccggcaggcgggggtgggaacgcagcaggggagggtcctgccaagtcctgactctgagaccagagcccacagggtacaagacgaacacccagcgcccttctcctctctcacagacgacatcgcctgcaccttttgtggccaggatgagtggtccccggagcgaagcacacgctgcttccgccgcaggtctcggttcctggcatggggcgagccggctgtgctgctgctgctcctgctgctgagcctggcg

SEQ ID NO: 45152 - DNA, 1385 bp, Homo sapien
cgagctctgcatgcggcaggaccgccagctccccacctcaggcagggctggggcatgcgccacgagtcacatgatgtccacgaagaactcgcaggggttccccatagccttctggaaggactggcggctgcctgtcaattccggggggacggcagccagctcccggacagggggtcccccgggtggcccccccaccactgtataggccttggtcgtggggtggggcggggggagccccggggcggtagccgaggcctgactgcgtgggctgctgccacggctgagctggccggccggacgctctcgccagctgctccccaccccactcggtgccgtgtgatccgattcactgccactgcccccagctcccgccgcccgacgctccttctcacggcccggggcccggcggctgctccgggtggacccactgcttttgctccctgggagtgagaacaggatggggaaggagcctgtcagcaccaggcccggccacgtccagaacaaccgcccccgccaggtgaccgggcaggaacggtggcccgtgcaggacgggtgggtggggcagccatgcaggcgcgaggacagggccggcacccccagggtcgcaggggcagctgcggcaggcatgggctggtgggggcagtgggaggcaggcagggtcctggggcaagctgggcgcccccacacctcaccccgatgcttgagctgagggcctggtcttgcggctgaaagactgaggtgccagcgagggcccctcatgcccggtgcccccgtggccatcctggattccccacccaaggccccactgtccccccggcccaggaccctggccgacggatgactcagctcagccctgtcctgggctcccaagacgcagtgggagctggagggcgtggctggctggggacatgctgagggaccccgggcgggaccctggcttaccggcccaaggtccgctccgctagtccttcagtctaaggcttgtttagcacaagacaagggatagcacgagttacacgcccggctgcctggcacctgcccagcacccacccgccaccagtggggactgaccgcgggctgggcggggctgaagtgggcgcaagcgccggtcgagggtcagtagacacccagcgtggcttctctgcggtcccacaccctctggccgcctctcctctctcgccctccttcctgggccctccacgaagccacctgcacccctccctggcctgcagacgcccctgctggcctcaccaaccccacccactggggcctctgctccaccaggcaacacctcaggaacactctggatccccggcccctaaacacaccccagccaggggcacaaggctaggatgcacggcaccatccacgtcaggctccctacc

SEQ ID NO: 45153 - DNA, 946 bp, Homo sapien
gagcagcagcggggtggggtggagctgggggtggagcagcagcggggtggggtggaactgggggcggagcagcagtggagtggggcggagctgggggcggagccggggaagggcaggtaggggcggcgttctcaccttcactctgctgactcccggtgctgccgctgccatagctaaagcccgggtcctggtaggcaggcgggaagcagggtgggggtcccgggtactggtaggggtagccctgacccagaggccagggggcagccgggtggggcagcggggccagcgtgtcctgatccgaagtcccactggagccactgttgaggttcagggtggcgagatctggcgggggagggtaggtgagggccgcggaggggcctccggcgttcccctcccccccgccctgaagcccgaagcccccactcactgctgcagagatccccgaagacgtagtagcactgctcggagaaggtgatcttgttgaccgtgtgccgcaggaagccgtgcttcagcaagctgctggcgtacttccgggcctcccgccgctccttgaagccctccacgtgtgtgtacagccagtccaccacgtccgcccctggccggcaccagcggtcagcccgcagcctcgaggcaagcagccctgcccctggcactatccgcccgcggggacggccactcaccgatgacggcattggcgatggtgatcttgagccacatgcggtcgcggatctccagtcccgagtctggcagctgcatgacccggacgacggcgctcatgtcactcttcaccgtcagcggcgcctcttccagctctgcaaagcacagacagccccgcttcagccccagcatctgaaggcgggggactcagggccctgcacccccaggggagcctctgggcagagcctgcgccagggcgcaagctggacggtgcgtgacagcagggccc

SEQ ID NO: 45154 - DNA, 1395 bp, Homo sapien
cgcaccaacggcaggcgctcccggccagccccggtggaagcgatgcggccgaccgagtctgacacgggccaaggcaggactcggggccgggaagctggggccagggacgccgggaaccccgcctgccatcgccccgctccacggacaggtgggcgcgcgccgcacacgggccgaggccgccacccgcgccgcatctagcggaggcgcgtcgcggtcgcaggtccccgggggcgcgaacggctcaggacccccgccccgtccccgcgcgggcaggtgcgacccccgagcccgcgccaggctcgcgcaggcctcgcggccgactgacccgaagtcctggtccatggacttaaagaagaatttgtaggcgtgcacgggccggttgctgagcacgttcttgaagtcggccagcgtgacgcgctcgggggccacgggcagcttgaccaggtacggcgtctcctcctcgtccatgtggtagataatcttggtctccgccatggcgcggcggcggcgcggagcccgcgcgctcagggcccggcccggggctcggacgcggggcgctacccgcccgcccgcctgcgccccgcccggcccgcaccgctctcggccccgacgctccgaggcccccgggcgcccccgcccgaccgcccaggccccggccgccgcccccggctcccgcgcgcgtcccgactgctgccccgcggcccgcggccgcccatccgcccccggcccgggagcggcgcgagggacgcagcacggagggcgcgctcagccccgccgccctcccgcctgcgcccctcgggccgcgccgttaaagggaccgcccggcccggggtcctgagcgtggccgcgggggggcgcccgagcgcgcggcgttgacgtcacgggggcgcacggcgggggcggggcgaggatgcgcagacgcaggcgatcatcgctcgccccgccccgccccggccccgcccccgcgcgcgggcccgcgctccattatgatccggcgcatgcgacgcgcgccgctggctgtgggcccgtgggcgccggggcgctcgggtcgggcggagggaccccggggacgccgggtgcgcggcgctgaggtggcgcccggtcgctctgcgccaccgcgaaggctcccgactcgcgtgccctctgccgggtcccacggggtccaggcagcaggccgagcggatgcggggcgcgcgggggcgcgggcgtgcacggaggcgtcggagcgcccggcggcgggagggatttagtcctggggttctccgcagggcaggggagacttccgaggcgtcccttgaggccgcggggcgtccgcgcttactgttccggggctcgcggggctggaggccttcccgacccgaccccagcaggaagcgcggaggccactagagggcg

SEQ ID NO: 45155 - DNA, 2425 bp, Homo sapien
ggcagagcccagaagggtctgagggcatgatgggcatcagtgggattttggttgtgccaggggtgggcagggccacccgtgagcaaaggccgcaggggtgggggctatgctgccaccaagcccctgggagaggggtgtggaggcggcctctgcatacgcccaggccaaattccaggaaagcgggaccagccgctggaaggggggtgagccccggagcatcaggagatgccccgaggagcacagacaggagaggtgcagctgctggcccagccaggagcccagggcctccctatttgcagttctccttccggaaccctggaagccaagggcgccaacgggttggcggctgtcctccaccctcatcacagtgggagacacagggcagacccccccgcaggactccccagggatttctgagcctgaggtggcaggggccccgggcctggctggtgcctgccatcgttggtcccaggtgaggtggaatggggacaggcagggctctgagatgggctgaggtcgcccccgccgctcacctttgtctaggtcgatgtacttggcaggcagggggctgtgggccagctccgccctctccttcaggatgttgtttttgtaatctgtgggaggagaggaggctgaggtccccgctcccaggatgcacttcccagcccgggactgggagccgcgcctgtgccctcgtgtcccagcactgcctcacctagctggatgtcctcactcctgtaaagcatctggtcccctgcagccacagcgaactccgccaagttaacatccttcctggatggcgagggtgggaggaggttacagctgggtggggtgaagggggccctggtccccaggagggccgggaggggggcactcacccctttgactttcccgacttctggtccgagtattcgtagcctgggaaggagactcacattgggggcagtgccgccccttccgcaggtcccccagcccagaggaccaccctcccgcccacctcagtctcctggggccgctggctttgccggggcagcctcacctccgcggcgcctgcgggcggccaggaggacagtgaccagtagcaggatgaagagcagcagcgtggccagcacgtagcccagctgctggaagaagtgggctcggctctcggggacgatgacattgatgacgttgtggccgcgcgccagtgtggggtctgcggggaacgcggggtcggggcggcgtcaggtaccagcaagacctgcgccccgacccgggccacggcccccgctgggatccgcgggcctcgggcaagggacagcgggcgcagagcaacccccggtggggtgggctcccgccttcccgggtcccagggaggcctccttcacctgggcctggggcgccgctgtggctggagccgttgcccggagagccccgggggggcggctccgcgtggggttcggcgaccgtcaggtggaagacgcggcgttcgtgcaggccacagtaatggtggtgcaggtggcaggagtaggtgccctcgtcggcgacctccagcggctcgatacgcagtgagaagtcaccgcgctcaaaggcatccgcgcccacagccacgcggtcgcgcagaaaaaggggcccgtaggcgcggcgctcgcccgacgcgtagaggtccagcaggcggtccgcgcggtcgtgcgggaccccgggcggctgccggtcccagtgcaccacctgttgagcctcctccacgtgccggtcggtccacacgtgcccgcggttcacgcaggtcagaagcgcgggtgcgccgcgcgccaccgccagcacctccttctcgccgtcccagtaggcgggggtggccggggctgcggagggggcgcggtcagcggcgcgcgggccggggcggcggtcgagggtcgaggggcgggagctggggggcgggggggaagcactcacggccgtcggtgacctccaggcggacggccaggctctcgtagaggtggcagtagtgatggtgcaggttgcaggtgtacagccccgcgtccgtctcctccaccgctgcgcacccaggaggaagccgcgcgtgagccttgcggtgcccccgaccccgcggccccggacccctgccccgaccccgcggccccggtccccggtccccgcaccgcggatgagcagcgagaagttgccgtcgtcgaaggccgaggccgagagctccaggcggccgcggtcccgcgcctcgtacacgcgctgctcgcccgccgagtacaagtccagcaggcgccgcgcggggccacccccggggccgcgcaggtcccagtggagcacgcgctggcggtcgtgcagccggtcctgggtccacaccatgcgcgggctctggcagcgcagcaccgcccgggcgcccgcctcccagctcaccgcggactcggacaccacggagctgccagcagcggcg

SEQ ID NO: 45156 - DNA, 2116 bp, Homo sapien
gccaagagccagctagagagagggacggccaatctgccaccctgctgcccgggtcttctgcaacacctgggactggcagcagcctcaatcctgagagacctcacacccggcaaatggagctccagacccgcaggaaaggctgagtcctctgagaatttattactacggatcacagcagcaacgggcgggaagggcggcgccagactcatttgccccgcaggtagatcttgggggtctgccagccttcgggggcttcctttagccccgccttcagccagatgcgcctcaggtctttctcgaacttgatctgcaagacgcagagagagggaccgccaagtaattcgtggcaaagaaacgtgttctcagcactttgccctcccagggccaagcagggggccactcacctgcttgcgtctcaggcgtccctcctggaccttcctccgcaggaaccgcgtcttcttcaccagcttccggtacttgtggtggttcatcttccgccggcggatcttcagcacgtttttgcactgaatttgaggcgcatccgcgacgccttcatccccctgctcggccccttcccctatctggctgggcggacactggtaggattgcggtggagccacagtccctgcggtcccggtatccagtctgggcaggaagcagcgggccgtgagccagctctccagggggctgacggacatcttcctggggaccagcatctcctccagctccagctgggcccccttgcgagggagagaggccgccctacctgggccggccggcgatgtgctgtaaaggggcccgcagacccggctgcccagcactccagagacgggccaaggcgggcggccgcctgcagaaaaccagacgccacggtcaccgctcgcgagaccacacaggcccgtcgggttgaggagcagcaggttcgtcccagcgaggatcccccgcacctcattcctggcctgaacccctgaggttccctctgtgagcatcggaagcttagaggggaaagagtgtgtgtgtggccaccggccctgccccagcggagctgctgagacccgcactcctaaccaggtgtgcatcctcccatccgcccccgcgcggcttcctacctgcccaaggaacggccctcaacagctgggaagtcaggcgccccaggagcatggtctgtgggcggcggccacaggtcccaggggagctggaacacaagtgcccgttcaggtcaggcggcagcgccttcagtagtcgcgggcgggccgggactggggcgtctggtcccgccgcgaccctcgcttcccttctccctccgccaccccaacccacaaggaggactttgcttccaacacagctcgcgccccgaggctcccaagcccccgacgcgggcggtgtcgcgctcggacgcaccgaaaggtcccagaacggggaggccggccccctccccgggttcacccccgcgcgaatcgcgttgcctggcgcccggaccctctcggctggaccccgggcccgcctgccgcagcgcccggcgccctcaggcctcccgctgacccttcccaagcccgacctcgacgcggctcaaattgaccgttctgcggccgccctcgggcacttccggtccgtccccaagtcggccccgatcggcagcggccacccggcggttcctacgcacagcgcccgctggcgtcctcgcggcccccgattctgcattggctcaggccccgccgggcccgaaaggcgacggtttccggttagtggaatcacggtcccagtcctcgcgcggttcctcagctccgcctggtcccttacggaggcaaaaaactacatttcccacaatcccagggggtgcgggccctggatatacccgcaggtccagaatcgtttccggaccacccaggggccggattcccaacgggccgacggaagtgcgggctcaagactacggaagtgacgtatctggcaacggaagtggagttacgtggaaggcggaagcgtctagagctatttcccccgtttttgctagagaccaaggacccggaataagcactgagcctgcggtaccgggcctccccgactcctcattcctggggttaaaaaaaaaaaaataagacgcaggctgggcgcg

SEQ ID NO: 45157 - DNA, 1191 bp, Homo sapien
cgctggaacaacacctgcccggtagccatggccacctagagtagaagaaagtttccgtattttcaaacgcaccattcaaagccttcgcggccgaaagtcatcgagtaacgtgggactccccacgcagaaccaaacactgaaacgcttcccacgtccacaaaggctcttcgcgtcccgccgtctcgggatccagcgcactggcgggcggggaggccccgggtcaggggcatgggctggctagggaatggcgccgaggctggggtcggggcaggggctggggtcggggtctaggcgggggcggtgcgggcccgactcgccgccaacaaaggcggctgccgccccagcggttacctgggccggaggctcgcggccgcgccctcacctgcggcaggcggagcaggataccggccgcctggatgagctcgcagcccaccacgcggaggtcggtctctgtgtcggtgtcgaggccgctcgacatggacggcgtgaaacggagcttgtcgtcaggcaggaggcagttctccaaggtgatgagcaccccggagtacagcctgtccccgatcagcaccccctgcgaccctgagggtgcgcccccagatcccggggcgccggccgctgccgcgggagctgccgaccctgcagcaccagccgccgccgccgccgccgccattttgtgccgccgactccccttcggcttcttccctcagggcggctcctcgcgaagctccacggccgccaccgccccgccccgtcgcgtgccattggttcggcccgcgaccagcgcgacgccgcctagccgcaattggctacataacctgcccgtcagcaacgcgcctaacgccgacgccggaacctggcgcgggtggggcgggctcgttacccaggggactccgcggtgccggccgacccggaagcatgtctgtccctagcggaggcgcgggtgccgtgctgagagcgcctgcctgtgcgccccgagcggggctgggactcttccaagatgcccacgttcgcacagagaccccggatcgcggaagctcgcgtctcgaaaggcctgtgggtcaaggggggccatctcggtgggatctggggcgggacgacccccactgctgaaccctgggcgcggggcagggtcagaggctccgctcggcctccccctggatgagacgcgcatgcccggtgtcccccggccgc

SEQ ID NO: 45158 - DNA, 1025 bp, Homo sapien
cggagggatgagagcagcagcgactagggcggtggctggcgacgcagggagagtgtcaaggcggctctgcagtggcccgggcgaggggctggagcagggggtgacagtgggggtggcggcggggcgggagaacggatgtcccacagtttgcctgcggggcgacataatttgtcggagtttcgaagcaaggtatgaaaggaaggggctgagggtggccgggcggctgcacactagctgggtcgcggcgcagaaacgcaggggccgcgagtgcgctggccggcgggtgtcccgggtccacgcttacggtcctcatgttctttttcttcaggtatcgggctttggtgcatttcacaaaggctcgaatcacggttctgaccgccaacctgtagcagcgatttttccttccccggaagtgctgggacagaaaacgagaaaccagggttgtcagcggggcccgcgccggccgccccttggcccgcgggataccccgggcgcccagtgcccaggccgggcaggcggcactcaccctggcgtgcttcagcacctcctggatccgaaagtagcggtcggtgacgcgattccgcagccagagctgcgcggtgaggaagaccatggcgcctgcaggccggcgtcccgaacactcaacaacgcacgcgcagcgccgctgccatcttgcccgggtcggaaatggtggtcacgagcgcttccgggtcagcccctgcgatacttccggggcgaaggtcgtctcccgtcagcccgcgggtgcccagttgtgctcctgaactcgcggtggtggtgcgtgttggggagcggatgtggggccgcggcggggactgaaaggagaacggggccgcagcgcccgtggctattcgcggacgatggataaacagcagcgcacgcggaccgtcccggagcacggccccggccgcagctgtggctccgagggcaccgtgagggcagcggacccgggtcgggggccccgcggccggggagctcgggtgcggcgcgggcggggaggggcaggc

SEQ ID NO: 45159 - DNA, 1678 bp, Homo sapien
cggaagcctcttccctgatgtcccctccaggcaggcagcctcagccagagagcctggaaatcactggggcggtggagcctggagcctgctgtctggctcagcccgtggactctatgccctcacactccttctccccccctccaagttcaggcagcgcctggggcaggtccccctcaggcatctgggccacctcggcccactgcgtccgcagagtggggctggcccctcggctcagcagaagccccacggtaggcccatgccctcgctctgcagccaggtgtaggggggtctttcggagccagccggtagcatccacctgggcacccctgtccagcaggcagccggcaacctccacgtggccttcccgagaggcgtgatgcaggggtgtgaggcccagggtgtcccgcgcatccacctcggccccctgggtgaccagcaactggacggcaagcaggtgtcctcgggcggcagccctgtgcagcgcagagcggccatgcctgtccctgatgcctgggtctgccccgtggcccagcagcacctcaatgtcctagaagaggagagaaaagcaggggccggcctcagcccggtaggcgaggggcagagccaccaggcgtttgcccagcccaggcctcttctgtccccgcagcggcctgtctctcctgacaccacttcctcatgttgtgaggccgaacccaaggctggcctgcttggaaacgtccacttttccccctaagagtccttagagcaaatccaaggatctgcagccaacaccctgcccgctgcccaggaacgggggtctcaggcacaggcccggcgctggcggagagtctgttgctgccaccagcatgaagccgagccccgggcctcggatcccgccctggtctccacgggacggggctacaccggaggggcacagccgggggcgcgctcagggccttcgtgcctggacaccgtcccccagcctggctccagctgccccggtggcacgtctctggggatcctggccctgcgccccctcccatcactgccgggcggagggcgggacgtacctgggagcggcctagggcggccgccagacccagcgctgtggcccccgcgccatcccgggcgtccacccgcgccccgcgcgccaggaggaagcgcagcgccgccccgcgccccgcagcggcagccacgagcagggcgccgtccaggcccgcgccgccggccgccagcagctccagcaccgccagccgcccgcccgcggccgcccagtgcgccgccgtccagccgcgcgcgtcctccgcctccgctgccgcgggtcccgggcccggagcctccagcaggcgcgcggccagcagcgtgtggcccagggcagcggcccagtgcagcggcgtgaggcccgtcccggagcgagccgccgccgaggccccgcgctgcagcagcagctcggccacccgcgagtgtccgtgccaggcggcctcgtgcagcgcggtgcgccccgcccggtccaccgcgcccaccggggcccctcgctgcagcaggagacgcaccaggggcgcgtggccccgcagcacggccaggtggagcggggtccggcctgcgtggtccctgaggagggggcaagggcgtcggcgcgggggtggaccactgaccagaaccccgccctgccccaccccgtcctgccgcccacccagcg

SEQ ID NO: 45160 - DNA, 1132 bp, Homo sapien
cgggcccctttctgctggcacgggggctggcgccagctggtgatgagagggcgcaggagggcagaagcgggcagaacgcggcagtgggcgctttttctgagcctcccctcaagggaccctgctcagccctttacctgctgcgtcccggatctcctgttcacccctcagcactgcctggcccacagcggcccgccccctcccctctccccgccctgcctctccttcgcccaggccctaatccttcatccctccatctcccccctccctcttcccgccctgctcagcccgccacggcccctctaccgccccgccccgctctttcatctctatcgcccactcctctctcccgccctgcacccctccgtctccctttgccgtggccctgcatcctttcctccaccccgctctctctcccctccccgctccaccctgctcccgcccatccatccctcaccgtccggccctcaccgccccttcatcaccctgacccacccacaccctctcctccgcgcctccccttcccctccatcaccctgccctgccccttcccctccatcaccctgccctgctcccctcttctcccccttccctccatcatcccgcccgctcccctctccacccctccccttcccctccatcaccctgcccagccccctcccctccatcaccctgccctgcccccagccctccattaccccgccccgccccccactgacggcccgcccggcccccaggtccaccccgctccgggtccccggtgccgcgcgctgttctcagaccgcggctccgcggcgctcatcgtgttcgggcttctctcgctgccgccgctgctggtgctcgcctcggccgtccgcgcccgcctagcccggcgcctccgcccgctgctgcctccgcccgctgggacccccggaccccgccgccccccggggcgccccgacgaggacgagcaactctgcgcctgggtgtgacccggcggccgctgcgaaaccccgggaggcctccgagctcgcgcgcgaccccatcgcgtggcccggcccggaaaactgagggtcgcccccgctgccccttcctggctgggcgcgcagcgctcccggcttacgaccccggcctcccccgcccgcagccccgcccc

SEQ ID NO: 45161 - DNA, 675 bp, Homo sapien
cgcggctgggggtcggagaggggtggagagcgtgggccgcacagcctcggccgggagagggagactggagtgtgtgtgtgtgcgtgcctgcgcgtgcgtgcctcggtcgtatctcggctggtgctgcgtgtccctgcgtgtcggggtccgctcgtgcgcgcctctccggggtctgtgcgcgtggccctccgctcgcgccggagggcgtgggcgtggcctcggcgtgggtgtggccgctcggggaggggcctcccgggggcggggccggcctggtccgcgcggtgacgcgccctgcagccccgagcgagcgagcgagcgagcgagttgccgagcgcgccccgtccctcgcgcgcgatgctcccctggacggcgctcggcctggccctgagcttgcggctggcgctggcgcggagcggcgcggagcgcggtgagtgcggcgggcggccgggccggggctggggcttctggtgaccgctctgcgccgctgcccgcgcaaggccgtcgctgtcccctgctccggacgggcgggcgggctgggaggctgcgggagccgggcgggggcgcgggcggagcgtcctgctcacctgaggctggcggcccaggtgctccaggcgacaccgtccgtgagcgccggggcataggggccgtcccggcccgcatctctgcgggatcgcg

SEQ ID NO: 45162 - DNA, 1433 bp, Homo sapien
cttctgacagggcctgagggggctgcaccctttcctccgtcctcccccagccaaggcacgttctgagaatccccagcatctgcggggcatggctccagcagctccttggccgcggggccccgtctttcctagtggggcctccaatctccagatcttccccatcagccagggccgccctccagcagcggaggaggaactgaccgctgttccctgaccccctgcaccacccacagacgcgatgcggccgcagcagctccatgccacggagatcacgtccagcggcttccgcctggcctggccacccctgctgaccgcagactcgggctactatgtgctggagctggtgcccagcgcccagccgggggctgcaagacgccagcagctgccagggaacgccacggactggatctgggccggcctcgacccggacacggactacgacgtggcgctagtgcctgagtccaacgtgcgcctcctgaggccccagatcctgcgggtgcgcacgcggcccggtgaggcagggccgggggcttcgggcccggagtcgggggctgggccggcccccacgcagctcgccgccctccccgccccagaggaggccgggccagagcgcatcgtcatctcccacgcccggccgcgcagcctccgcgtgagttgggccccagcgctgggctcagccgcggcgctcggctaccacgtgcagttcgggccgctgcggggcggggaggcgcagcgggtggaggtgcccgcgggccgcaactgcaccacgctgcagggcctggcgccgggcaccgcctacctggtgaccgtgaccgccgccttccgctcgggccgcgagagcgcgctgtccgccaaggcctgcacgcccgacggcccgcgcccgcgcccacgccccgtgccccgcgccccgaccccggggaccgccagccgtgagccgtaagccggcgtccccgcccagccgagagggccggcgcctacctgagggcccctgtgtcccgaacccggagcggaggcgcccaacccggcagacgggtgcaggcccggcctttccccacgcggactccgcgcgaccccggccctctccctgcggccgcagggcttccccgcctggcgcctgccctccagggctggggcctcgcctggcgggaccccgcagcagccccggccccatccccgcccagagccgggcgtcgtgtgggtccgtgggtgataattgagagcgtcagacccaggactgttcagggaggagccccggtcagactcccacgtgtgaagaccgggccccaagtggcaagggctggcctggggcgggcagcttgggtcctggacgttgataggaagcggaaggggaatcgcgggaagctggcccaggtcaggtccgcaaaggcttctgaagaagaggaagggcgagtaggggcacctggacgctgatg

SEQ ID NO: 45163 - DNA, 1093 bp, Homo sapien
cgccgcgagcgcgtgaaccgtgggctccggggtggtgccgacgcggctgcgggccgggactgacgttgcgccgggttcgagtactcccctccggagttttgtcccggtgcggctccggtacccagacgcttcaccacgccccccgccctccgcccgctcaccccggttcccgccgccccggagcacgctcctaaattgcggcgccgtcgctatggcgtcactgccctcgcggccaatccaagggctgcgcgcgtgtcccttacgcatttccgtcgccgggaggaaggggtgtgtgtttcgcctgcgcagtggtcctggccaccggctcgcggcgcgtggaggctgctcccagccgcgcccgagtcagactcgggtgggggtcccggcggcggtagcggcggcggcggtgcgagcatgtcgtggctcttcggcgttaacaagggccccaagggtgaaggcgcggggccgccgccgcctttgccgcccgcgcagcccggggccgagggcggcggggaccgcggtttgggagaccggccggcgcccaaggacaaatggagcaacttcgaccccaccggcctggagcgcgccgccaaggcggcgcgcgagctggagcactcgcgtgagtgcggcggggcggggcggggcgggcgggcgggcgggacgggccggggaagcgggagccctggcccttgccgctcctcgctgctgtcggcagccacttcccgggcgagactgcgcccccggagcacccccggccggagccgtctcgcgtgccgggaggatcggactctttccgtcacccgtttgcacctctgcagctgtcaggagcgggtcaggtgcgaaaagcggtgcggaggtggcgctcataggttacaggggtcagggtctggggctggccgtggtcttcagttaccgccgagcgtgcgggatccttctgcgcttgccgcctccacgtggcacaggccaaggcgtggccagatgggtagatgggtttgttgggtggttgctagcagtttccacgtaacaagggaagcgtatttgagagttacttgattctaacgagactagcagatttgcacttcttgttggaaga

SEQ ID NO: 45164 - DNA, 1449 bp, Homo sapien
cgctgggagcgcgtggaccgtgggctccggggcggcgcctgcccgggcaccccggccccgtccacgccccgcaagaggagctcgctggccccgccacgcgggaaggggtcgccccggggtcttgggcgggagggccgtgcgggctgcggagacaccgaggaggggaggcgcctctcctgagctcttggcgcagcgaccccagggcgccgactcatcgcggaagggctcggcttgcccgggcgccggtgccgcctcgggtgaggttcccgcgagactcttctctgcgtcctggactcaccgcagggcgccccgccgcacggatcgagaaccttggggctccctggaaacttgccacccgctgccgccaaggccggaactcctcggagcccctagcaacggagcccctagcaacggagcccacgcggatgcggcgcggggctgacgctgccttgggttcgcctacgtccctcgggaattttgtcccggcgtggctcccgtagccagatgcttcgccgctcccgccccgctggctcccaaagcctgttcggcagtcgcggcgccgtcgctatggcgtcactgtcctcggggccaatccaagggctgcgcgcgtgtcccttacgcgcttctatcgccgggaggaaggggtgtgtgtggcgcctgcgcagtggcggtgaccaccggctcgcggcgcgtggaggctgctcccagccgcgcgcgagtcagactcgggtgggggtcccggcggcggtagcggcggcggcggtgcgagcatgtcgtggctcttcggcattaacaagggccccaagggtgaaggcgcggggccgccgccgcctttgccgcccgcgcagcccggggccgagggcggcggggaccgcgggttgggagaccggccggcgcccaaggacaaatggagcaacttcgaccccaccggcctggagcgcgccgccaaggcggcgcgcgagctggagcactcgcgtgagtgcggcggggcggggcggcgcgggcgggcgggcgggacgggccggggaagcgggagccctggcccttgccgctcctcgccgctgtcggcagccacttcccgggcgagactgcgcccccggagcacccccggccggagccgtgtcgcgtgccgggaggatcggactctttccgtcacccgtttgcacctctgcagctgtcaggagcgggtcaggtgcggaaagcggtgcggaggtggcgctcataggttacaggggtcagggtctggggctggccgtggtcttcagttaccgccgagcgtgcgggatccttctgcgcttgccgcctccacgtggcacaggccaaggcgtggccagatgggtagatgggtttgttgggtggttgctagcagtttccacgtaacaagggaagcgtatttgagagttacttgattctaacgagactagcagatttgcacttcttgttggaaga

SEQ ID NO: 45165 - DNA, 1098 bp, Homo sapien
cggccggccacagccccggacaacctgggcccagggctgctgtccagtcccgccggcccgggcgtccacgaggtcccttttacatctgtacagcagccggttggctcggtggccccggtaagtccccgtgcggctcacaggtgccgcgggctggggtggccattgtggtagagtttctgcttcacgtgtaccatgttcccggcggcctcctcgaagggcctgtgcggccgccggcccagctcccgcaggctgcacagcttgggcagccaggtccacgagccatctgcggggggacaggggcggtcaggcggctggggccggccagggcggcagcactcccgggcggcgggcacgaggcactcaccgtagcgccgtccggctctccaggcgcgcacggcgcagtgcaggacgccgtccatccacaccaggaaccagctgatgcaaaagcccagcagcagccccagcatgaggtcgatctcctgcttggtcacactgtccgtcacaaagtagttctcggaggcgtccaccaccgactggtccccgtcgtacgggatcacgtagtggatatggtgcctgggggcggcagggcgggctggcacctctcccgccacccccggcctggccttcccccggggcgcctaccccgtggtgggggtgtgaccgcgtcaggccgccctgggggttctctgaagcagcctcttgggcgggcgggtcgggaagggggcaccagactcaacgaggcccaggtcacaggccagagggagtgggaggtcagtggccatgggctgtggaggccgagcgtgaagtccgggcagacagcgggaccagctgccggcgagggtgtcggccctcactcagcacctcctccctgaggcctggagctcacgggaaggtgctgcaggtggaagaggcctcccccggagggggctcaggacggcggtccccacggccagggtcacagctcacccgcccgccccggggccgcggaggccacttggagcagagctggacacagggagccctgctggccccagaccagccactcccatgcacccttccccccgctgctgtgccctttcctccacggctgccaccgcg

SEQ ID NO: 45166 - DNA, 2651 bp, Homo sapien
gccactgcgtgagggtgtcctgaggggtggaagtgcatgcgtgcgtgcgcgggggctgtgtgtacgcacatgtatatgcacagacgccacacacatgcgcgtctcatgagaagatgtttatttcgtacatggacgtacaaacatgcatggccaagaggatcccatcgctacacgtgcacagagggggtcacacggtgggtgcggggggtctgggcgctcccctcaatctgaatgaccttgaggaagctccacctccccgctgcccccccagcccatccctcagctcctctccagcccgggggtggtgcccagtgcccctcaaggcaggcccttcccgccttgacctgcattcccctgcccagggactcagtgcagggcccagccctgtgccagcaggcgcttcctgccccagccctgatgaggctggcttgggtctccactgtggacatcacactgggctgcggctttccggcctccaggctggaccaggaggccccgtgacccattccgccatcaccctggaggcctctaggaacggcgtcctaaagccatgcgcccccaggagacccccgcccaccttgagacagctcctccccctgcgcacctggcagccctcaagggtggaaggcggctcgcggcctgcgtggggctggttcccccgcgccccgagtgggccccgccacacatgtgcgctcacgcgtgtcgagccggcgccggttgtggactcaccggccacagttgcagtggcagacgcggtcctcgccccgcaggtgcgggaggatgtagttgtggaatcggtccagcagcgcgttcatgtccatcaagcacgcgatggcctggaagagctcatgaccggtcagcgccaaggagcgggcgggacgaagcggggctgggggtggggagcgcaggccggggtcggggcagcgcaagcggggagcgagagcgcaggccggggtgaggggagcgtaggccttggtagggggagcgcagcgggtatggggatcgcaggctggggaggggagcgcaggccggggtggggggagcgcaggcccgggaggggaccgcgggccggggagggggaagcgcaggccggggtggggggagcgtaggccggagagaggagcgtagggagtgtggggatcgcaggttggggaggggagcggaggccggggtgggggagcgcaggccggggaggggagcgcaggccggggaggggagcgcaggccggggaggggagcgcaggccgcacgggcggtaaacaaggcgcgggaggtgggccaggcggcgcgcgcgggcggggagcagggggcgcgcgcgggaagcccctccgctcaccatcacgaccgacgcccccagaatcatgaagatcatggtgttcgcgctcatggacatcgggcggggccgggccgggccggagcgccgccccccggccccggcgcccccccggccccggcccgatgctgagcccccgccgcctccgcagaggtcagcgcttccctggatcgtccgccgccgctcgctgcaaccccggcaccggccggggggaggaggcgcgggggggggggcgccggggagggacgcggggcctttctggggtctctcggcccggcccgccgcgctccgctccgccctcgggtcctccctgcgatgcgctcggctcggctcgactcggctccgctcggctccggccccctccctgcctcctcctccctcctcccccctccctccccgccgccttcctccgcctctcgggagggaccgcgcagaccgcaggccgccccgtgccagcgccgggaggagaccgccatcccccggacgccggccgggacccctccccgggagcctcggcttcgcgtcccgccccagtctggtcagacccagccccggtggcctgtccggtgaccctggacgccagtcctccggtcctggaggggcgccgaggcccttcccgccccactgctccgccctacgtcctggactcccaggtcgccgggtgcgggactgccccagtccgctcggcacgcacgtgcctccagggtggggtccgcaaggtcgcgacagccccacggccgtgggggccacaggtcagggacgggatgacccctggaatcctcaacggagggatgtggcacaggagccgagggcagggccgccccgcacaggcttcccttagggcggggacgagggggtcagcccaggcccatgggtcgggacgccggccattcagaggcccagtggccaccactccgctgtggctgtccctggctcggggtcctgaggccaaactctcatccacgaccggtgaccatgtctcaggcccgggagccgacccccggcctcagcaggaagtcagcgggaagctatgcctgggacccagcctgggtcgtggcgccatccaggctcactgcagcctccactcctgggctcaggcgatcctcccggctcagcctcccccgtagctggccttgggggatccccgcccgggggggttccacatggagaggggacgccgctccaccacaggcagcagttgtggcaggagcaggcggcttccgcttcaggcagcacaggcacgggtaggcccagaccctgtcagcaccaccaggtctgagctactcctcccaagcagtggtcggaggtcactgagggcg

SEQ ID NO: 45167 - DNA, 1413 bp, Homo sapien
cgctttgttatttacaacatcgtggtatgccgtgattgtgttgcgcgccgtttccagggaaggtggccaacgacgcacacgaaataccatgatcggccgccgccgcgcagcccctcgccgcggacgctaccctcgccccccgggcccggcctcggagagctcgaaggaccaccggacagcgggcgcctcgtcccggaacctgccttccctgtgatgcccacccgcgtgtggactacgcgcgctgccgtccagctgccatcccaaccagccgacccacgagcgcggcccggcccggcttcctctcaggggtcctggcgcgggccagggggaaccggggaggagggagggccggtcgccggagcagagcgcgcggggacagggtggagcccaactacctgaggatgttgtgcgcctccatgctccggttctggttgctcgagcacaccaccgccacccgcagcggggacgacggcatggcggcggccgcaaatcccgcggctctcccgcttgggttcccaccctaccgcggcgcttccgcgcgaacaaaatggcggccgcggtggccggaagcgggcgacgcgaaacgacggcgccggcggtgtagcgtgcggcgactgcgcggcggcctccccgcccaccctgggcgccgggccgcggacggagcgcaggcactggccttcgggcgcgctgcactcggcgaggccgggggcggccaacgccgcgccggcccccggcgtccgcagcagagacccgcactccacaaggcccggctgagcgtcacggcgccaagcggcggcgtcctgacatcagcaccccgcgccggcgcctagtgtgacgcgacgacgtgcggaacaacaggacgtcataaggtgtcgccgccgcctttgggagcgatgcgaaacgccgcgcttgccggagatagcattgagggcccttccgcggcccggcgtttcgtctcttgggacgattttgtgcgttccctcggtccccgtggggcccatagtcctcacttctgccaccccagagtcgtcgcgcttcactagacccgctccctccactgtcccggaggcccacagacattcccgcattctgaggctcgctcccgtcccgtgccgctgttaccggcctccggccccggctcatacaagcaggagcacatcgctcttttatgaaagcccttcaacatttaacgtttaaatgcgagggccgacctgtgacagacctggttgggagtgcacgtcgactaggatcttcctcgcctcgggcttccttggagaggccgccggctggtctgagatttgggtccagttacagtaaatccagtcaacgcgagtgtgtcattccccagctatgcctgtctgcctggatgcagcctcgcggtggacagtgggctgatgttttgccgtgggagcg

SEQ ID NO: 45168 - DNA, 655 bp, Homo sapien
gccacgcacaccgcgttcccaggcttcagggcgtgggggtcgccgtggactcccggacgtgaaaacgcttaaagccagctgggaaaaccccaccagcgttttccgcgcacagcgccagccataggaaaggacccccaggagcgaatccgggcagggaaaccccggacgcccgcacactcagcatcagtaccggcacccagcacccagcaccgagcaccgagcacgcagcacccagcaccgatcaccgagcagagcaccccgcacgcagaacccaccgagagcctgatgcagtctccgccgcaggcatagcgctaggccccggcgccttcacaacaaagggacgctggcgggcggggcctgagaggcgcgcggtggaggggccgggcgcgaggccgcggagacagctcggagctcggcactggggagtggcacagcgctggcggatccaggtgggcttcacggggcgcccgcgggaccggaaatgacgcgcagaaccctgcatcgggctcctcgctgccccgcgggcgccgctcctcagtgccccagagccacggagccggggaaacgcgccgcggcccacaacgcccccgcggctgcccgttggttccgcccgggccgttctactccaggcagacgggaggagaaacacggcgcg

SEQ ID NO: 45169 - DNA, 1372 bp, Homo sapien
cgctgccgcctggtggtccagcccgggccgttgcagtgcagccacacggggagggacacggcgcgccgagtgctccgggcggccgcacgttggttccgcccgggccgttccactgcaggcagagggagaggacgacggtgcgcgtagtgcatccccgtggcccgttggttccgccggggccgttccactgaaggcagaaggggggggaccgtggccccaccccccgcggcagcccgttggttccgcccgggcggttccgcccgggctgttccaccagcggcacttcagggcgggatcggccagtctgtggaggcagcggcctctaagccccggagggtttactgcccaggtttgggttccaggaataagaaatccactgaataggcttaacttagaagacacaaaggcgcctcctggcggaagtggccacgctccgcccagcctgagggaaagctgctctgacagctgggcccggagctgcggggggcggggccgccgcgcggggtgaggactcgcctcagggcgctgattggctggtggcgcgctccggggcggggccttcgtatccaggctggcgtcggggctgccgcgggacatccggagcagacacccgcgggcgcgcctgcggccccgaggacccccggctccggagcttcgtcgagcgttttcctagcgttactttcccaaataattttcaggaatgaagttacggctaaagggctctttagagattacttttgggccgggcccggtggctcacgcctgtaatctcaacactttgggaggccgaggccggcgcatcacgaggtcaggagcttgagaccagcctggtatggccaacgtggtaaaacgtcgtctctactaaaaatacaaaaattggccgggcgtggtggcgggcgcctgtaatcccagctactccggaggctgaggaaggaggatcacctgaacccgggaggcggaggttgcagtgagccgagatggcgccactgcactccagcctggcgacagagcgagactccctgtcaaaagaaaaaagaaaagattacttttggccgggcgaggtggctcacgtctgtaatcccagcattttgagaggctgaggcgggcggatcgcctgaggtcaggagttcgagaccagcctggccaacatagtgaacccccccccatctctactaaaaatacaaaaaaaaattacccgggtctcgtggcgcgtgcctgtggtccccgctactcgggaggttgaggcaggagaatcgcttgaaccttggagttgaaggttgcagtgaggcgagatagcgccgctgctctccgacctgggcgacagtgggagacttcatctcataaataaataaataaataaatattactttta

SEQ ID NO: 45170 - DNA, 2429 bp, Homo sapien
cgtgtgcggggtgtgcagggtgtgcggggtgtgcggggtgtttgagggtccggatgtgcgtcccgaggtcggagggttggacgcccctgtgtccagttgttgggaggggtgggaggcctcgccctgctgttcagccccttcccctccactgggccgcgttcccagggacgtgcaacagggcgctcaggttaggagacccgaaaccacaggcagacaggacccgccacgcccgctcccagccctgggcacccccacccccgtttccttccagtccattttccgcggcagtttttggtcctggggaccgtcaccgatgcctcccacgcacgctttcttccctgaagggagacgtcgctgcgctgggcctctcggcggtcccccccacccgggtcccgggcccactggccccccgcagacgccgctacacgctgactccagccaggctgcgctgggaccacttcaacctcacctacaggtgcgccctggctgggccccgggggagggggcgcggccggcgcccgctgagctcactctccctgcaggatcctctccttcccgcggaacctgctgagcccgcgggagacgcggcgggccctagctgccgccttccgcatgtggagcgacgtgtcccccttcagcttccgcgaggtggcccccgagcagcccagcgacctccggataggtgggcgcccgcccccgccccggcccggccctgcgcgcccggcctctcagccccgtgctccccccaggcttctacccgatcaaccacacggactgcctggtctccgcgctgcaccactgcttcgacggccccacgggggagctggcccacgccttcttccccccgcacggcggcatccacttcgacgacagcgagtactgggtcctgggccccacgcgctacagctggaagaaaggtgaccgtccaggctggcctcctggaggcctctcctctgcagcacagtgggctgccgcggtcgggctttggggcagacggcaggagggaccttccggggtggtggctgccactggagtctagcaggcaaggaggggagcccgtgggagcccccatcccggcagccctgaactccctttcccatccccctgcgcctctggagcgggagctggagctgcattcctgggggccgagctcaccgcctgggcccagaacattcttatctttccgtggctgcggccgagggcggctccgcggctgcgctccagcagatacaccgggcctcggggagctggcccacgggcggcggggctgggcccggggctcccaggcgctgacccccggggcccgcaggcgtgtggctcacggacctggtgcacgtggcggcccacgagatcggccacgcgctgggcctgatgcactcacaacacggccgggcgctcatgcacctgaacgccacgctgcgcggctggaaggcgttgtcccaggacgagctgtgggggctgcaccggctctacggtgagtccctttgtcgggcgggagggcggggaccgggcggtcctgagccaggccgtgctccccacgctcccgacaggatgcctcgacaggctgttcgtgtgcgcgtcctgggcgcggaggggcttctgcgacgctcgccggcggctcatgaagaggctctgccccagcagctgcgacttctgctacggtgatgcccacggggccgggacagggctgcgtgggagctgggccttggccatggtcggggctgagggggcactgacggggctctttcccccacccggagcagaattccccttccccacggtggccaccaccccaccgccccccaggaccaaaaccaggctggtgcccgagggcaggaacgtgaccttccgctgcggccagaagatcctccacaagaaagggaaagtgtagtgagtgagcgccccgggcggtcctcggggtgggcagcccgcgggcggccttggggcaggggtgcggggcaggcagcgggggggggctgtgcctgcaggagacgccccgcccccctgcagctggtacaaggaccaggagcccctggagttctcctaccccggctacctggccctgggcgaggcgcacctgagcatcatcgccaacgccgtcaatgagggcacctacacctgcgtggtgcgccgccagcagcgcgtgctgaccacctactcctggcgagtccgtgtgcggggctgagcccggctgataaagcactttctctctgatggctcctcgctcattcttgggagggcagcgggcagccagtctgggcaggtggacaccccagcccctggtccaccgagagctgggcgtcctcggggctgggcacccctgcttccccgcacagcggaccacaggtacagcacaggacgggacgggctttgctaaggtggcccctgggaaagtgggataagaggaggccccagtgacaggggcagca

SEQ ID NO: 45171 - DNA, 768 bp, Homo sapien
ggtgcctgtaatccctgctactccggaggctgaggcaggaggatcacttgaacccggggggcagagggtgcagtgagccgagatcgcgccaccgcactccagcctgggggacaagagcaaaactctgcctccaaaaaaaaaaaaaaaggcaggggcgaaaagcaagcaccggaaccaagcgcccgcctgtgacagcaagtgcccagcaccagggggcagcagacacgcgtcccgccgagcacagctgcccaccgcgccgcctaccttccctgcgggcctcccgctccttgcgccgctcctccgcccgccgctcgcgctccttctgctcccgctgctccttctgctgctcccgcatcttgcgctcccgctcccgcttcctttctaactgctccaagcggtccctgaagaggcacacgccatcattccccctaaacagaagcttgcttatcgcgtttttgtccacatttgtaagctggctttctacgtaattcaatccgtgaagtttttttttcatttttttattttattttctttgagacggagtcttcatctgtcccccaggctggagtgcggtggcgcgatctcggctcactgcaacctccgcctcccgggttcgagcgattctcctgcctcagcctcccgagtagctgggattacaggcgtgcgccctgtactcccagctaatttttgtatttttagtagagacgagggtttcaccatgttagccaggatggtctcaatctcctgacctcgtgatccgcctgcctc

SEQ ID NO: 45172 - DNA, 1195 bp, Homo sapien
cctgtagtcccatatactctgcaagctgagatgggagaccgattgagcccaggagttccaggctgaagtgcgcttgtgaacagccactgcgctgcagcatgggcgacaaaaaagagtgatgggttctgaaaaatgaccgcttgaaatcaagtctcgtttctgtcattcttgtatggtcttgggtaacgtaattcacctcagttcagtcttccgtacaaccagaataacaacacctacgtgatagtatcgatcgcggattaaagatcatccgtttaaaggctcttaactcaggacctgccactcatcaaacactgcttttactgtcagaatctgctagaaagaccgcttggactacgtgaagccactagcacactggacagctgcaccttgagaccggggagatgctccgagatgtgctcgcgaacaaggccacctgacccgggcactgggctatttcctcgggttcagtcccgcacacttgaggttcagcctggcagacgttggctccagacagcgtttggacccgccgcctccaccacccaaagttccgtgcgggatgagactgtccgcggaagcgagggtgtcgctcgcccccgggcccgggtccgccccgctccgaggcctgctcggaagaaagacctcggtgcgcagttctcgtcgcgctcccacacctggtccgcccagtcggaactcacccctacggggccgcggccggtccctgagcctgagaagaaacagcaaccggcgctcgccagaagtatcctcacttcctgtgttgacgcctaatgatgatataatagccgacctctggcccagaactcaagacgacaggggctcgctctgtgcggcacttcctgtgtctgcgcgggatgatgacgcataaaacagcgcttgctcaggtccaggactccaaaagaaactgcgccgtgagctgcacttccgacttcggcgcgggccggggcgccgagcagagcgacgccgacttttggagcagtttgcgcctgcgcggaacgcgtggccggcttccggaatcctaccgggacttttccggtagcgaagcccgcgcctgtgccaaggcttgcgagcagaatgccttcgcgatggacgcccgcattccacccccttgaccgctgggacccctagtggcgggtgggtggagcgcgctccatttacctgctggttacctcgtgaggcg

SEQ ID NO: 45173 - DNA, 655 bp, Homo sapien
gccacgcacaccgcgttcccaggcttcagggcgtgggggtcgccgtggactcccggacgtgaaaacgcttaaagccagctgggaaaaccccaccagcgttttccgcgcacagcgccagccataggaaaggacccccaggagcgaatccgggcagggaaaccccggacgcccgcacactcagcatcagtaccggcacccagcacccagcaccgagcaccgagcacgcagcaccaagcaccgatcaccgagcagagcaccccgcacgcagaacccaccgagagcctgatgcagtctccgccgcaggcatagcgctaggccccggcgccttcacaacaaagggacgctggcgggcggggcctaagaggtgcgcggtggaggggccgggcgcgaggccgcggagacagctcggagctcggcactggggagtggcacagcgctggcggatccaggtgggcttcacggggcgcccgcgggaccggaaatgacgcgcagaaccctgcatcgggctcctcgctgccccgcgggcgccgctcctcagtgccccagagccacggagccggggaaacgcgccgcggcccacaacgcccccgcggctgcccgttggttccgcccgagccgttctactccaggcagacgggaggagaaacacggcgcg

SEQ ID NO: 45174 - DNA, 970 bp, Homo sapien
cgcggccgcctggtggtccagcccgggccgctgcagtgcagccacacggggagggacacggcgcgccgagtgctccgggcggccgcacgttggttccgcccgggccgttccactgcaggcagagggagaggacgacggtgcgcgtagtgcatccccgtggcccgttggttccgccggggccgttccactgaaggcagaaggggggggaaccgtggccccaccccccgcggcagcccgttggttccgcccgggctgttccaccagcggcacttcagggcgggatcggccagtctgtggaggcagcggcctctaagccccggagggtttactgcccaggtttgggttccaggaataagaaatccactgaataggcttaacttagaagacacaaaggcgcctcctggcggaagtggccacgctccgcccagcctgagggaaagctgctctgacagctgggcccggagctgcggggggcggggccgccgcgcggggtgaggactcgcctcagggcgctgattggctggtggcgcgctccggggcggggccttcgtatccaggctggcgtcggggctgccgcgggacatccggagcagacacccgcgggcgcgcctgcggccccgaggacccccggctccggagcttcgtcgagcgttttcctagcgttactttcccaaataattttcaggaatgaagttacggctaaagggctctttagagattacttttgggccgggcccggtggctcacgcctgtaatctcaacactttgggaggccgaggccggcgcatcacgaggtcaggagcttgagaccagcctggtatggccaacgtggtaaaacgtcgtctctactaaaaatacaaaaattggccgggcgtggtggcgggcgcctgtaatcccagctactccggaggctgaggaaggaggatcacctgaacccgggaggcggaggttgcagtgagccgagatggcg

SEQ ID NO: 45175 - DNA, 1394 bp, Homo sapien
cggacaccgaggacctggccgcccaagcagaggcgactgacaagcgcggtccgggctggacggccccaccttccccgcccgggagagccaggccggacagcggcctccctcagacccgtccccaaggccgagcctcgccctgggccgtgctggtgccccattcgggacggagcggtggcccgtcagcacttccacggcctcctcagcaggccagatgggcagggccggcctggtgtctccccgcctggccgcgcgctcgcgggcagcgatgaccccaggcagcgggcgaccccaggcggacggcaggccgggtctgctcactcaccgttcgctgccgcgggcgcctgcgggggcgtctacatgccggaccgagcccgcaggccccgccgccgcgccgccgccagccgtcgctacctggcccttggcgccctggccgcctgttgccccatggccgcccggaccccggcgccggcgccgccgagcagcaatgcgccgcgcccgcccactgcgcaggcgcacccgccacgcatgcgcgctgccgcgcacgtggggcgtcccgcgcgtctgccgggtcccaccggcgccgggacaccccgcgcgggcgggaggcggcgggcgtggcgggaaagaggcgggcggtggggaagaggggcgaatcgcggtggagagcagtgaccagggagtggaggcgggcagcggggacaggggcgggcgtccgcgactcgggtaggcgggggtcggcgccccgaggagggcggcccccggctcccgtccccactcacctgccgcgtccggagggcgcccccgggtccgcccgccacgtctacgcctaggcgcccccgacattgtgatcccagcccggcgtcccgcccccaactcaccgccaccgcgggcgggacctcccggaccacgtgggccggctcaggggagtgcaggtgccccgcgagagctggccccgcccgccgccgcttccctaattaccgggctgtgacacggtgtgggccgagccggatttgggaaccgaaacttagagcagctgcggcagcgctgcgctccctcggggctgtccgtcggggctgggagggcggccctgcgcctgggggaaccgcgatcggcctcacgcccacctctagcggccaggtgcgccttgcacgcccacgaacgtcctcagaggtctacgcttgggatcccaaggctggcagtggagggaggacccggtggcctggggcacctctagggggaccagggagccgtgttttgcgcaccccacaggctggaggactcggggagttgggggaggaggccaaagccacaggagcggactttgtagtgtttgttggaactgcgggtcccacccagcccgcacttgctgaactggtggctgctcatcagcg

SEQ ID NO: 45176 - DNA, 2121 bp, Homo sapien
cgggccccgaaactcggcgcggcggcggccgccccacaaaggcagcggtgggagcgccatcttggcgcggccaccgggcccattcattcgcggggccgggccggggtccgcgcaaccctcgagtcgacacgcgcggggcgccagcgccggacagacccgggcctcggcaggagaagggcgaggccacagcgcgactgcctcagcggctcgacacagcgaaaagggccgaaaccgttattttcccatttcccgacgccgcgcccggcttccgctttaaatccctactccgaccgcggcgcgcggcccggcttccccatttcattgttccccttccccacgctcgcgccccgcggccgcccggccctcaaagtcaccccgataggcggcccgcgcgggggctccggccgccgacaccgccccgcctgcaggcccgcccggcctttgttctcgcgccgcgggcccgagagccacgtccggctccccacgcagggcccggccccgcccgacccgcgcccccggggccccggccgccgccacgggaagcgcccgcggcgcacacaaccccgcaccccggtgccgaaactcggcccccagccttgggcctgggaccccggctcctctccctagaccccgccctcgaccccgaccctgcaccccgaacctcggaccccagcccccggcccccccttcggacgccgcccgccgcacccgggcggggcaggaagacgcggccccgaccggcgggtggggtgggggcggggcgggcgcccccagggcgggcgggtggacgaacaggacccgggtccggggctgggggctgccgcgctcacctcagcgccctcgtcgcggcctgacgcgcccacaccgccgcctcggccgccgctcggcaggtcgtcgcgctcgggccgcgctgcgcgctccgcgggcgctgcgggcaggtgcgcgccggcgaggctcggtccagtcccgccgcggcggctgctccactcccggccccgctccccactcgccgcccgctcccgctcccgccgccgccgccgccgcctccgtccgcccctcagacgcctccagccatcgggatgggcgcggcgggcccctgcccgcagcctcggaaaaccccacgcgctcgcgtcaccacgcacgccgcgcgtcgcgcgcgctcgccaggcccgacgggcacgcgcacgcctgtgcgcgtccaaaccgcatcgggccccgagcgcgtgtccgagcggcttaaaggggccgtgctgctgccttcgggtaccgctgccccgggagacccccggcggcccggccctgcggggaccgggcgggatggggaccggggcagtggaccctcggagttgggatggggcggggggaacgcgggcgtggagccctccggggacagggtaaggttgggtaaccgtgggcgggggctcctccaggggcgggggtggggtaacggcgggcggggggcactcaagcgacagggcaggggcgggaaggccgcgggcgggggcggtccctccggggacggggcgggtgggggcaccgcgggcgagatcgcttcctgcagaggaggcaacaggccccgctagcaggtcagggtcccgggcaggcgcaggtgccccccggcctctcaagcagggactgcggcgagctcagacgcggctgacgggcagagactcgcgcttgggctcagtgcgtgtgaagtgggcctcgggctgcggaggagggcagcaccccgtggctcctcgcgctgctgcgagcagggccgcctggcaggggcgggggccggtgggcgggagtgtcggggtaaggccgcggactcctcccatgccgctgagcagtggacagcggggactggagacctccaggtgaggaaggggaacgaagtcaagaaggccacatgtcctggcttccaggcttggtgtcctcagaagcctccagaacgtccatggaacccgcccctgcgcccaccgcctcctgctgtctttccagctgagttccggctgcccctcaccctcggcttcttcactctgcctctccccagccagcgccctgctccccggtcctcaaccaccaccttccacctgcctgggccttcatcgcctccgagctccccttccacaccaa

SEQ ID NO: 45177 - DNA, 1468 bp, Homo sapien
cgcccgagcccagggcctgcccgtctcaggctgggtgttgccccaggcccggactccggcagtccccatctgcggtcccttttgggagctggaaggaggcgggacaggacggctgcgggggtgcaggggctcctgggccaccgggcgcgctggggcacgcgctgcagggaggatctggggctcctggtacgtttggacaacatgacccagctgctgtcacattcgaacgaggctgaagaggacgcggacggaggagccccggaacctggctgccactgcgccccgaggtggagcagggagtcgggccgagccctccgcggcgcgggcggctgctggcgaggggcctctcgggagccgcggtcggggcaccctgcggggccgcagccggcgcctccgttcgttcccggcgacggtgggagtccggaagggaaactcacagggccgtgtgtgaccgaggacggagggcggcgcggacggcgccgtgttcgcagtgctcgaaatccccacgaccggcctcggacggcgaccccggccggcccagctcccactccaagcggggtgacgccagacgcccaggccccgggaccgccccgagtccgcgcggcctgcgagcgccgtctggtgggaaagcgcggagcttccgacgcggggcggggcttccaggtggggcggggccgagacagggtggggcgggcgtcaaggcgggccgtggggggggggggggaagtgacggggcgtggccggatgacggggcgtggccgggtgacggggcggggccgggtgatccgggctcccccgcctttccccgccgccgctaggacgcacggcggtggcgagcaccggctcccacaggctgtgccacgtgaacgtcaagcaagaagcgagagacggccgcgcgcggtggctcacgcctgtaatcccagcactttgggaggccgaggcgggcggatcacctgaggtcaggagttggagaccagcctggccaacatggcgaaaccccgtctctaccgaaagtacaaaaattagccgggcgtggtggcgggcgcctgtaatcccagctactcgggaggctgaggcaggagaatcgcttgaactcgggaggcggaggttgccgtgagctgagatcgcgccactgcactccagcctgggcgacagggcaagactctgtctcgaaaaaaaaaaaaaaagggcgagaagcctctagtgcagcgctaggccccacctcagggcgcgctgggcttcgctcctcctcccccacttcgcagagggaagctgaggcacagcccggctttatggaacccagctgaggactgcggatggcgggagaagccctggggccgctctcgctgctggtccggggctgctggcagctctgcgcgctggtcccggaaggctttgttccaagacaagcctgcatttcccaaaataatccatggtttttagggctggtaacctgcagcccctccgc

SEQ ID NO: 45178 - DNA, 1412 bp, Homo sapien
ggatcgtaggggactcccgcggaggccaggcgggagaggtgggagggaaggtcctgcttgctccaggtcagttcccgccagcggccgggactgggcgacagcggaggcggcctggtgaggtaagggcctggcgggcctggccccggtgacccccgccccagaaccgtcggacgcacggctccgccgcggcctccacttaccccacgtgccacaggctgctccagcgggcctggggcgggcacctgtggggacggcggcacctggagcaggcggggcatgggacggccgacctcgccacccgtgcctccccatagggcggggccaggccccggctccctcccccccgacttactggtccgaggggtcgcagctgccgtccgcgaagcccagcgccacctgtggggacaagggtgagcccgggaggggcgtggtccgagcagggacccgccccgcggtggccgaaccgagagagaacgccgcccgacccacctgcggcagcggcaggagcggcaggagcggcaggagcggcagcagcagccgcagtccgcgggcggccagcggcccccgggccatgctctgaggaggttggagcaaagcccggcggcgcggctttatggggccccgcccaccacaggacacacccaccacatgacacgcccacagaacgcccgctcagagtaaaccccgcccaccgggccccgctggccgcaggccccgcccacaggcgcacacgcctactggacgccccacgcagggtaaaccccgccctccgggcaccgcccagagcaaaccgcgttcgtcgcaggcctcgcccacaggacgcctcacgcagcataaaccccgcccactgggccccgcccagtgcaagccttgttcgccgcaggccccgcccacaggagccctcgcccacgagacgcccccattcgctgggcctccactcaatgcaaaccccgcccactggccccatgcccaacgtaagcctcgcccaccataccccgctcagcgcaatcccctcccactgggccacgcccaacgtgttcagagggcttgtccgccacaagccctaccccgcagctccacctggcccagactcgtgaggcgacggtgggtctcgtcctcagcccgggcacggcgccttaacctcggccgagcgtggcctgctctgctgctggtctgggcgtggcccggggaccctcgggagctggcctggaaagtcgtggctgccttgggtgtggtccctcgggtccagtctcgcaggcgggctccaggtggactgtagggtaacgccaccaagatgctgggcatcccgaacttggtgtttggacacttgattgtggacctgcgctgcaggcgctgtctgggggctggcccagggggctggagcctggccctggctctgggctgttgaggcg

SEQ ID NO: 45179 - DNA, 1326 bp, Homo sapien
cgtgtgtacgtgtgttaggctgtaggtacacaggtgtatacgtgggtgttaggttgtaggtacacaggtgtacacgtgggtgttaggttgtaggtacacaggtgtatacgtgggtgttaggttgtaggtacacacatgtgtacgtgtgtgttaggttgtaggtacacacgtgtgtacatgtgtgttgtaggtacacatgtgtgtattaggttgtaggtacacaggtgtgtatgtgtgttaggttgtaggtacacaggtgtatacgtgggtgttaggttgtaggtacacaggtgtatacgtgggtgttaggttgtaggtacacacgtgtgtacgtgggtgttaggttataggtacacgtgtgtatgtgtgtgtgttaggttgtaggtacacacgtgtgtacgtgggtgttaggctgtaggtacacacgtgtgtacgtgggtgttaggctgtaggtacacaggtgtgtacgtgggtgttaggctgtaggtacacacgtgtgtacgtgggtgttaggttgtaggtacacacgtgtgtacgtgggtgttaggttgtaggtacacacgtgtgtatgtgggtgttacgttgtaggtacgtgtgtacgtgggtgttaggttgtaggtacacacgtgtgtgcgtgggtgttaggttgtaggtacacacgtgtgtacgtgggtgttaggttgtaggtacacaggtgtgtacgtgggtgttaggttgtaggtacacgtgtgtacgtgggtgttaggttgtaggtacacacgtgtgtatgtgtgttgctgtgggtacacacgtgtgtacgtgggtgttaggctgtgggtacacacgtgtgtacgtgggtgttaggttgtgggtacacaggtgtgtacgtgggtgttaggttgtaggtacacacgtgtgtacgtgggtgttaggttgtaggtacacacgtgtgtacgtgggtgttaggttgtgggtacacacgtgtacgtgggtgttgtaggtacacacgtgtgtacgtgggtgttaggctgtaagtacacacgtgtgtatgtgggtgttaggttgtaggtacacaggtgtatacgtgggtgttaggttgtaggtacacaggtgtgtacgtgggtgttaggttgtaggtacacacgtgtgtatgtgggtgttaggttataggtacacacgtctgtatgtgtgggtgttaggttgtaggtacacacgtgtgtacgtgggtgttaggttgtaggtacacaggtgtgtgcgcgctaggttgtaggtacacatgtgtgcacgtgggttaggttgtaggtacacacgtgtgtacctgttaggttgtaggtatacacgtgtgta

SEQ ID NO: 45180 - DNA, 1956 bp, Homo sapien
aatccgcgtcctgctgagctgttaggtttgtggatttgtcactgcagcgatgggatacgggtgcagtcagggaagcctcagagcaggccgggacacagcaccagcgccctgccgtgggtcccatgtggccaagcggggtgcacacaaagcctcttcttcgtgctgagctgggcgtgggaaggcatcatgtgacgaggctgcacagaacacgtgtgtcgtgctgagctgggcgtgggaaggcgtcacgtgacgaggctgcacagaacacgtgtgtcgtgctgagctgggcgtgggaaggcgtcatgtgacgaggctgcacagaacatgcgtgtggtactgagctgggcgtgggaaggtgtcacgtgacaaggctgcacagaacatgtgtgtggtactgagctgggcgtgggaaggcatcatgtgacaaggctgcacagaacacgtgtgtcgtgctgagctgggcgtgggaaggcgtcatgtgacgaggctgcacagaacacgtgtgtcgtgctgagctgggcgtgggaaggcgtcatgtgacgaggctgcacagaacacgtgtgtcgtgctgagctgggcgtgggaaggcatcatgtgacaaggctgcacagaacatgcgtgtggtactgagctgggcgtgggaaggcgtcacgtgacaaggctgtgcagaacacgcgtgtggtactgagctgggcgtgggaaggcgtcacgtgatgaagctgcacagaacacgcgtgtggtactgagctgggcgtgggaaggcgtcacgtgacgaagctgcgcagaacacgcgtgtggtactgagctgggcgtgggaaggtgtcacgtgacgaggctgcgcagaacatgcgtgtggtactgagctgggtgtgggaaggcatcacgtgacgaggctgcgcagaacacgtgtgtcgtgctgagctgggcgtgggaaggtgtcgcgtgacgaggctgcgcagaacacgcatgtcatgctgagctgggtgtgggaaggcgtcacgtgacgaggctgtgcagaacacgcgtgtggtactgacctgggtgtgggaaggcgtcacatgacgaagctgcgcagaacacgcgtgtggtactgacctgggtgtgggaaggcgtcacatgacgaagctgcgcagaacacacgtgtcgtgctgagctgggcatgggaaggtgtcacgtgacgaggctgcgcagaacacgcgtgtgatcgctcacggcctgcctcccaccaccgaagcagcctccaccaggcagggctctgctgcttcattcatgggagaggcccaaaggcttcggacggcgtctggcacgcagtgggcaccctcttaccgcgtggggaggacgggtgaacgagagtgtatctaagccaccggcacagatcgcagtgggcgccctcttaccgcgtggggaggacgggtgaacgagagactgtatctaagccaccggcacagatcgcagtgggcgccctcttaccgcgtggggaggacgggtgaacgagagactgtatctaagccaccggcacagatcgcagtgggcgccctcttaccgcgtggggaggacgggtgaacgagagactgtatctaagccaccggcacagatcgcagtgggcgccctcttaccgcgtggggaggacgggtgaacgagagactgtatctaagccaccggcacagatcgcagtgggcgccctcttaccgtgtggggaggacgggtgaacgagagactgtatctaagccaccggcacagatcgcagtgggcgcctcacagcagcccccgggcacagggatgggacctgcgcaggcgctgaggaccgggaggtggtgtgagcgggcagggtcgtctctagggccttctttgggggttcctgggacctgctggccaggaaatgcccgtgagtccacagacgcttctgccagcccatggccccttgcgtgcagagatgctggtcctgggagagctgcg

SEQ ID NO: 45181 - DNA, 823 bp, Homo sapien
cgcagtgcccagagacgacaaaaggagtcaccacattggccacggagaccttgactgcgagagggagggggcgctgcctccaacgggacccagcgggaaagcgcctggaacccggggaccctcgggggctggcacagccagccgcggacagacacgggggcacgcaggacacccagccgcggacagacacgggggcacgcaggacacccagccgcggtcacacgcgggggcacgcaggacacccaaccacggacagacatgggggcacgcaggacacacagccgcggacagacacggggggcacacaggacacccagccgtggacagacacggggacacgcaggacacacagccgcggacagacacgggggcacgcaggacacacagccgcggacagacacaggggcacgcaggacacccagccgcggacagacacgggggcacgcaggacacccagccgcggacagacacgggggcacgcaggacacccagccgcggtcacacgcgggggcacgcaggacacccagccgcggtcacacgcgggggcacgcaggacacccaaccgcggacagacacgggggcacgcaggacacccagccgcggacagacacgggggcacgcaggacacacagccgcggacagacacgggggcacgcaggacacacagccgcggacagacacgggggcacgcaggacacacagccgcggacagacacggggggcacgcaggacacccagccgtggacagacacggggacacgcaggacacccagccgtggtcacatgcggggacacgcaggacacccagccgtggtcacatgcg

SEQ ID NO: 45182 - DNA, 618 bp, Homo sapien
ggtccctcaacagaggctgtgccagcgccggggttccctgaaacgaaccagggactagaactattaacaaagtcatttttctggcacagctttccgggaaaggcgtttcatatgggacggagttctgcctggggggcgggggtcaaacccttccagctcagccccagggtcaaacgcatccgcccccacacccacctctggctggcctgggtcccaggttctcgggctccggaggcacagacaccccgggctgctcaggcaggcggcggtccttggcgattgccctccgcggcgccggcggcgtggtttggggcgggcagctccatggcaacggaagactccatcgtggccggagggggagcctcgcccgttctgctccccggctggagcgggtggtttggtccgacccaccaccgaccgcgcgggccggggccggggcaaggaggtcgcgggccccgaggcgcggctgaagggccaggccacaggccgcggggcggggacgtctccggggtcccagacagccaggcctggcccagggccaaggcttggaggtgacagacagacttggggggcctggaggagctcagcaccggcgcgttggcccagaggaccggggcg

SEQ ID NO: 45183 - DNA, 1666 bp, Homo sapien
gccagggcccttcatccagaagcacgcagcctcggggacagcttcgccatttttaagtgttttcacgaggggttgacactgtgctgtcagcgacatcgcgagcccagaagtgaataactgacacaacaatgattaaagtttgtgagcagcttcaggaaatggcagcgcaactttatgttcaaaagatccaaggcaggagagtgtgaggccttccctttcccagatcctaggggtgtggagggcgggcctggggccatgagaggtgtggagagtcagaactgcggcctgcggcgcagcccccacctgcttttcctctccccgcccccgtcgagggtccccagggatcaggacttgctcccaaagtcgcctggccccagctcccgcgaaggcaggagggttttggaagcagccgctggtgggggtctctctcctgacagctgcagggactggccccctccccacccaccgccggcgcagccagaagcagccacgcagacgtgcgaccccccacaaaccgcctcgggacgaggttctgccgcgcccgtgggccacagtgtccacgcggggcttgtgccggtgtcgcctcccatgaagacacccggagggtcccgtctgcggcgcgtgagggcagcggtcccggagagccagaccccggccagggagagctgcccgcgagggagggggcgcggctggcggaggggggcgggatggggcggggggcggggggaggagaggggagcggcgggcggggccgggctgcagggagcggcgggctggggcgggctcggggcgggctccgcgctccgtccgccccctcgcgcccgcgccgcgctcgctcagctcccgcccgcctgtgccgcctgtgcggccgccgggagccaagtttgcgcggaccccgtcccgagcccgccgcggccatggacgcgcccgcccggctgctggccccgctcctgctcctctgcgcgcagcagctccgcggcaccaggtgagcgggcggggtccgcgcggcgcggggtcgggggcggtggggggcccgcgtcggcccgagatagcggctgggagagcggccggcgcgagccccgggccccggaccccaagtctgagagccccgcgtcctccctccccggggtcttgccccgcgggcccctcgttggactcgcccggacgctgcccttgggctcgggacgcggcgacccccgcgctggccgcccccgcccggtgctgtccgccgtcctggtgctgaacctgggctgggcgagggcgtcggagcctcccggttcccctgctccgcggcgcgcgtggagggtccccgggtccgcggcactcgcgggtccctgcccggcgggtgccttgaggagaggaaagacctgagaactcggtgcggggaggctgctccctttgcgggggagccgttccccgttcccccagtgagcttccccagccggagggtctgggacggacggaggaggctgtctcgctgtggagggtgggcccggcctccggggtctcctttcagagtccgtttcaaatggcgtgggcagaactcctgagtgtgtgcaggtggacggcggccaggtgcccctggccacagaaaagagatggtggatttcttaactattttgggagggactccccagagaaggaagaggctgagaaggaggccccc

SEQ ID NO: 45184 - DNA, 870 bp, Homo sapien
cgcacccagctaattcttaaacttgttgtagagacggggtttcaccatgttgcccaggcttgtctccaactccaggcctcaagcgatgcgcccgcctcggtcttcccaagtgctgggaatgcaggcgtgagccaccgcgcccggcccaatccgcagattttaagcggggacgacttaaaaacaggattgctgagctgcgacgaggggggctgcaaggggaaggacacgcggcccccggggctgagggcggcccggaaggatggactccgaggcggggctgaaaagggggcagccgcgccaagcaggaagcgccccggggtggggcgggaggcccggaggccccggagccagagcgggcagggccggcgctgcgcggtcgccgagggacccacgtgcgggacgagctccccgggcccccacgcgccgccagcccgagccccgtctccccgcgcgtccctcctgcgccccctcctgggcaagctccgcattgcgcgcggccgccagcagcccgggacccgcgcagctccccgaggccaggacagccagcagggaagtgccaggcctgaaacgccgccggaggaatggtacccagaagctcgggcgctggagggcggctgtggagtgaggggcacacgggcgcgtggaggcagttagcgacagacacacgtgcgccggcacatgcacacagaggcgggcacacacagacacgtgggcacagaaaggcacgcaggctgggccggtggctcatgcctgtaatctctgcactttgggaggctgaggcaccaggatggcttgagcccaggagttttaaggtcagcctgggaaacgtagtccatgtctacaaaaaaatacaaaaattagctgggcgcg

SEQ ID NO: 45185 - DNA, 2097 bp, Homo sapien
gcggtggaggggcctggagggcgattgtccagatcaagcccctcgagtaaggcccgagaggctgtggcttcagaaatgaaggtcatgggcgactcgggccaatgccgcgtccttgacctgggcgaagtgagcggttgcactcacgagtgtggacggcccttccctacaggggaccttggattcgctgggggcggagtgggggctggggcccagagaacccgagtccggacgctcccgtccgtgaccctggccgggttctccgctcctcgcagcttcagtccgcaagtgtgagatgtcaggggacccctggacggcggggccctcgggctggcagcgcgcgccgcaggagtttcgattcggagggtctgggcgaaggccgagaactcgcgtttccagcgagttcccgggggcgccgctccgtcccagaggccggggcccctccggttgccgggcagagccgcgccgcgcgcggtcccattggcgcaggtgcgccgcgccccgcccaacaggtagccccgcccgacaggtagccccgcccgcgcctcgccattgggccgcggccgggtgtcccccgaggattggcccaggtggcggccccgcctcgccctcattggccgcaggtgccaccgcccgccccgggaccgcccgccccgcggattggccgctggctccacctcggtccgccatgttcggacaccgccccccgcccccgccggacggtcccgccccgcgcgccccccgctcccgccccgcgcgccgccggagttccgcggagttgaccgggtcggcgccgtcggtcctgagcgctgccttccgcgttccgccgcggccccacctggagcccccgccccgcgccatggccggagctcccggggcgcagcgctgacggcggcggggggagcgcgccatgcccagcaggaccggccccaagatggaagggagcggcggccgcgtccgcctcaaggcgcattacggggggtgagcggcggagagggcggggagcggcgcgggtgaggcagggagggcggggagggctcagccgtcggggctcctgcgcgagagggagagagggaaggggcggcgaggtcgctgcgggcccggggctgtcgcgggaggtcctcggtccccgcccgtgagcgtcacccgcggacacgtcgtggacagcgcgggctccttccccgggaccgggtttccctggggtcggccccgcgccgcgagctcctcggcccggtcattgtggtagacgttttcgctggaaagttgggcggggacgttccggccgcaaacctgtaaggactgaaagttttcatcaagttgtgaaaactcctggcgggtttcttaaaatcagcgtttcctaaacgttctccacgtttacccggtcgggggtctcgctttagccaaaatccggagacccggggcgcgggcgctgtggctccaatgcagcccccggcagggctcggggcggtcgggcggggacaggggtttctggaggagacggtggggccgagactgaccctggggtttgcgtcgcacccgccccccggaggcccttgcctggctgtgggagggggcgcggtcaggtgctggagcggaggggtcctggactcttggccgccgcctcggggcagcgctgctgggggtggcgggggctgcaccaggtggccgggctcacaggcacagcggaggggtcgctgccccccgaagtgtgggcggtggggaggggaggacccgtgggtttgttcttccacctgtgcgcgtctccaggagccccgaactgggacctccgctcccgcgagggtggctgctgctgcagagagggaggggagcagaatgcgggctccggacttgcactggctggtccttgggatctcgaaaagctgctcctgccccggtgcgtcctcagctacagcgtgggcaacctgagccccagaggcagggacggccggcagggttaggcgggtgacaacttccccgggccacgtcctctcaggacagtgccccgggggtctctatggtgccctgcgagtctgagcgggttcagcttcctgcgaaccttgtcttggggtctcgggtcagccatctggggctgcttggccc

SEQ ID NO: 45186 - DNA, 1154 bp, Homo sapien
cgggtggctgttggtgcggggccgctgggacctgtaccctctaagttgggacttcagccccgcctctgcccccaaacgtggtgggctgagatgggggaggcccttggaagggcccagaggaaccccagggcctcacagaggacgtgctgtgtacggtgcctcctccctgcggcctgccccgcctgtgcttggagctgcatcgggcacagcctgccttggcgggcacgggacgagccgaggatccccgcgtcgacgtggaggtccgcggccgtcagcgttgcagcccttggccgggcactaagggctgagtgtggggccagggcagagggagccaggccagcagctccaggcccgggtggaggaagtgctgcctgacacgtgtgtctgctccctgcggcacgtccacagcacctgccagcccactttgggtgaccctcctgtttgtcctgtcctagcgcagccacatcccttgggagcctgcttgtctctagaaccttctgcctgatgcacaacctcagagccctccgtcgccatccctcccccgtcccgggagcagcccccccacttccacctgtcttggacgggagctggaagggacgtggttccagtcctgctgtgccaagcctggtgacccgagggtaccctcggcctcccggcctgaactcttctcctaccatgatggtgcctgggatgctgtgtggtgcccgtgggcagtggcggaggcagtggccccggctcgttgaaccttgggcactgcccattctgaggcgcccgctgtgcccggctcgttgaaccttgggcgctgcccgttctgaggcacccgctgtgcccggctcgttgaaccttgggcgctgcccgttctgaggcgccctctgtgcccggctcgttgaaccttgggcgctgcccgttctgaggcgccctctgtgcccggctcgatgaaccttgggcgctgcccgttctgaggcgcccgctgtgcccggctcgatgaaccttgggcgctgcccgttctgaggcgcccgctgtgcccggctcgttgaaccttgggcgctgcccgttctgaggcgcccgctgtgcccggctcgttgaaccttgggcgctgcccgttctgaggcgcccgctgtgcccggctcgttgaaccttgggcgctgcccgtt

SEQ ID NO: 45187 - DNA, 976 bp, Homo sapien
cgctttgctgtccacgtttccacccttagtctctgaggggcctagtgtgtgtatggtgggaagcggggtcagcccccgcctggaccgctgtgacagaaccccacagacagggtgacttacacacgacagaaacgtcttttctcaagttctggaggcgtggggaccccatctccaaatacagccacattgggggttagggctccccacgtgaatttaggggacacttcagttcgtcccggcggggactggggacgccgggctgtgtgctgtgtcctgtgggagagtttgttcaccctgctggaggctccctgatgagccctggcgtctgctaggacgtcattctctttactgattgaactcgaaggatgtccagttggcgcattttcagggtttcccaggcgcactgggggtgggtcctgtgtgtccccgctccagccagcttcgacccccagctgtgcgtcagtccctcagctccgccccccagctgcgcggccgtccctcggctccgccccacagctgtgtgaccgccctgcggctccgcccgcagctgcacgttcgtccctcggctccgcccccagttgctcgtcggttccctcggctccgccccctcggctgtgcgtctggccctcagctccacccccagctgcgcgtccgttcctcagctcagtccccaagctgtgcgtccttccctcagctctacccccagctgtgcgcccgccccttggttccacccccctccccagctgtgcgcccgccccttggttccaccccccccagctgtgcatccgtcccttggctccgccccgcactgtgcgtccatttttgactccgcccccggctgtgcgctcatccctcggctccgcccccggctgtgcgtccgtccctcggttccgcccccggctgcgcgtctgtccctcgactcggcccctcagctgtgcgccactttctctgtggcccacagtacctccgtctccgc

SEQ ID NO: 45188 - DNA, 1241 bp, Homo sapien
cgctgtccacagtgggggcgccaggggaaaggggtcagcttccccgcctggggctgtgtctggttctgattgcactgcagtgaatctgccctaaaccaaacgtcagaaagaaaagcggcagacgtttcatcacaacacagagacagacaggagcccgccctgctttaatgcgcatgcgggggagccgagaggcggggctgctggcgggggagccgagaggcggggctgctggcgggggagagcgtgtccgggcgccgcactctgcgcagggctcttggatggcgctcaccacgtcacgtcttctgtgctttcggccaagcactgggccaggtggctgtcaacatccagctgggtcagcctgcaagggaggggccacactcactcggccacctccgcggcatgctggccgcagagagcaccgtctggacctccgggccctctctgctcctgccgctggagaggatccggctggtcagaaacaagggacggggccaccccaggggctcatgcacccggcagaccacggtaaccgccagtggtgtttccacaccgtgcccgtgaggaggccacgccaggcccctgcgtccgagctgggggtggggaagctgtgtctcaacaagcctctctatgggattctggcgcctgctcagcttgagaacgcgctcatcgtggagcccggcagacaggcggcctgacccggagaaaaggcaggacggcgggtggcctgccagggagagccgccgcggctgcgtctacaggaggcagaagagtaaacatggctgggcagtggatgtgcagctcacgtcagagaattggtgtttctggcgaggagggaccaagcctcaccacggagaaggacgccgtcaccggcgtgcaggctgccaacctgccactctgggaggccccacgcggcccctgcacctctcaggagggcgctggcgctgggatggtggccggccaggcaggggtggcaggagaaaacccatccgagtcctgcaggtcagcgccctgggcatccagtggggccgggaggggtgtctgagcgcagccaccttctatccccggcctcatgtggccccatcagcccaactggagcggctggaaatgaccatcaccaggcctggccaaggtgtggccctggaagccaggacagttgacttccggccatgactcccggagagtgccggagctggcgtgctcagcagagctgccggggacgatgtcccggggctgagtgggcg

SEQ ID NO: 45189 - DNA, 1655 bp, Homo sapien
ctgagctcggccacctcttgaccttctgaacggctgtggtttccaaacacggatggataaccgggccgggcgcaggggtggcctactcacctgggggcgaactccttctggcacatggggcagctgcgcagggccgcggcaccctccacagacggctgctgctccaccctgggggccctgcagggatcaggtgccgggcgctggggcagggacctggcgggggattccaggtgccctcctgccccgtgaagcagccggtaggaacggcccgggccccacaggtccggcggaaagggtgtccaggaaaaggtcttgggtccgacagtgaagacttcagtgggctccgggccgcacctgggctcctgcaacacagagttgttgggccttgcccagcgatggctcccgccctggaaaccccttcatcgctaagatgggcccagtgggcacacctgtcctgggaaggcgggcagtgaaggcacctcgtgatccaggatcagctccgggctcaccgtgcgcagtagctcggcccagagccgctcccgctcatcaccccccaggagaaaccaggggcggccgccagaaggcctggggcagacagagagggcagacagggggtactcagtagcggaaacgctatggtggggagacccgggagggcctggggcagagagagcggggagatggggggtactagagggaaattcgatggtgcgggaggtggccggcagggttgggggaagggctgctggggcagacagtgcggagatgaggggtactgggggtgggggagcggggtgggtgggtggaaatatggggtcctcagcgggatgaggcgatggttggggagattgcggagggcctggggaaggtagagggttagatggggggtgctcaggggagacgcgatgatgggagaggcgcgggagggcctggggcggcgcgggggaagctcggcgtggggtgggggctcaaggcgggcgctgaatggcggcgcggggtggggcgacgggcgtgggggccgggcccgggggcagggagccctccccagggggagaatagagcgggaggcccgcgggggcgccgggaagcacgtgggagcgggaaaaccggccgcgcccccgcccggctcccggcctcacccgcccgccgggcgcggcctccggcggctcaaccccagccgcggcctccgcgccgcctccatccaagcccgcgccgggcggaagtgagcgcaagccccgcccccgcccctccaggccccgcccccgccccggccccgcctccagacctctgcagcgaggccgcccccctccgagacagtcggaaccccaggggccctgatcccagcctgtagggaaactgaggccagggttccttcgtcctgcaccgcacaggggggcctggcgtgagggtggggggcccaggtgggggagccccgcccgtgtcccctttcccgtccgggcagcccccgggccggagccccctccgttaccccgatggctgcccggcccgccccggcactgcctcctcccggctgcacccaacagctcccgcccccgtttccggctctgcggagccgcctctcctcccaggaccattccaggagtaaataaagcttgaaatccgccgtcgccaccaccgtttctttacaaaaggcg

SEQ ID NO: 45190 - DNA, 1797 bp, Homo sapien
cttctcagatgtgaaagccccttgctggcctccacagaccctcacagacggcctcacaggccaacacccagcggctgcactgcccatggtcactatctctgcagcccgcgtgtgcggccagtgtccctccggtgaccccaggcccaggtgcccggctgttggtcctgccagcatcgtgagccgtggtctgccgtcctggcacatcctgaatggaggtgcacgcatagaggctgcctgtgaatctcctgcgcttcctcagagggatttgcccccttctgggacgtgccctggggacggtcagttctcccaaatagtgacttcctttctccacataatgagagcctttggctgagggattgggaggaccaggaaaaagccgccaggccacgtggggcgtgacttggcgatcccggtggctccgggcgtcagcttggacctcagacgcccctcacagctcacagccctgtggcctgctctgagggccccgcccgccgccgagcccccgggagccggagaacccgcaggacgtcagccgggtggattccctcccactgcccctgaccccactgcccagcgccttcaggactagcggatgatggacttgtgctaaactggctacgacccctccggagcagggtcctgggtaaatcagcagtgagctgcaggctcagccagccgccgcctttggtttcctcccgccgccggctcaccccacctcagacccgagctagctctccagcctggttcctctgccggaccctcctcccgggcacctcccacgccccgccctcaagccccgcccctcaagcccccctccctcccttcgggccccccataccccgcccctcaagccccgccccgccccccgggcgccacgcgccccgcccctcaagccccgcccctccctccgggctccccacgccccgcccctcccacgaggctccctcacgccccgtccccaagccccgcccttcccccgggctcccccacgccccgcccctcaagccccgccccccaggcgccccacgccccacccctcaatccccgcccctcccccgggctccccccacgccccgcccctctttccggccccctacgccccgcccccgctcctccttctggcccttcccttgccccgcccctcccagtgccaccgtccttccaggcagcgcccacaccccgcccctcatgggcaccacccacacaagcaagccccgccccgcagggtcccgcccacgttccgccccaccccgccccagctgtgtcctcggcgcccagcctggggcagccgtccccgtgagccccgcgaggggagcctgtcccagccacctcgccgcttcaatttcctccaggtccacaggcccagcccggcgcgcgccgctcgttctgcgacctccagggcgagcgcgcttccggggcggccgtgcaagaggcgtgggaagcgcgcggggggttctgagcgtgcagtcgccgcctgcggacggcgaaggggcgggtgaaacgagtttccagcgtcgagcctgcttcgtttcaaggtggacgccacatgcaagccacgagcgcgtcgccgcacggtgtacgcccacggtccgggccgggcgttctgcgggtgcccccgctgcgccgcaggcctcagtggcgcgcccggggactggaaggctgagccgccctcctcccatgtgcgcgggagtccctccgccactgtgcccagatcgccggcgaagcgcagggggaggctgggaagggcatcgggagacacgggcctgcgccccctacccgggccccggcccacctgtc

SEQ ID NO: 45191 - DNA, 3224 bp, Homo sapien
gagagagggagtatggagccgccctggggtcacctacaggtaggtcctggctgcctctctagacacctgccctgccgcaggtccggccaagacctgcacagggactccgggccggctcccccaggataggaactgcgcccaggagtgctggtttgaggcaggttccagcctccactggggaagtgaggggcaggaggtcccagctgaaggtcactcaggttgcagcggcgtggccctctcgcctccgcccagcacccaggccagcttgggcacccccggcccgtggggcatgtccctccgcctcaggcgagcacagaccgagccctgcccctccccaaacacaccattgcgtccctgcgcccgcaggcctcgctggaagctgcctcccctggagaccacccggccgactgtccaacttcggggccccgggcttcccgctccccgccctgccaaggcttgagtctctcccactgcgtggccaggcgtggagggccggccgatccgaccccgaaagacgtctcagcgctccacggccccggggcggaggtcaggggtctcgccggcccgaacgccgggccccgcggggccgaagtcctgataagccacctggcaggagtggctggcagaccggctgcgtctggggcaccgggcgccgcccctcccaggcccgaagcccccggcccgcgcagcagggacactccgccaggggccggcgggcggggcggggccggcgcggccgggagccgcggacactcggccaccgagccaccggccacggcgcagcgggggccgccgggctgcgccgccagggtcacgcgacgcggtgcccgtctcggcgcagggtccctgggcgtggccgctgtccccctcgtgtgtgggaccccaggtcaccgtgtggcgtcccggtagtgtgtgggaccccagaggcgtccggggcctccccgctgtgtggtgtcccaccctgggagaaccccgggtgcgtggcgtggccccccggccgcccccagctggtttgcggtcgtggcgggggcctgtgggtttctgggccccgacggcggcgagacgggcgccttcccagcggcgcaggaagcggcctcggccggaaggggggccccgggcgccaccgccgcctccgcctccgcccgcgcccagcggccctcggcgggcggggccgagcggggccgagcggagtcgagcatggccgagcgtagccgagtcccggccgagcggagccgagtcatggcagggcgggtccgagcgtggccgagtcccgggcgagcggagccgagcgcggccgagtccgggcggggagcgcgcgttcctggaagagcccggctggggagcgggtcacattcttggccagcgctagggctgaggcggacgcacggcaacaaacagcgcggggggcggggccggcgcggggcggagcgggcggcgcggggcggggcggcgcggcggcggcgtgagctcagcgccgggcgctcagtccgagccggagcgagccgccgggaggatgtgcgccgagcgccccgagccccgcgccgccgccgcgctctgagggccgcgggcgagaggcgcctccgccgccccggaagccgggcgggcgggccgcggagccggcgggcgggcgggccgggggccggcggcgggcgcgacgcggccggccagcgccgccgggacgagccgggcgggcgcctcgcggtgggaggagcggggcggcggcggcgcgccgcgcgaggacggcccggcgggccccgcgcccgcgcccccgctcctcccgggcccctcggcctcggccgccgcggcgattcgcgcctcgcggcgccggcacctgcccgcgcgccccccgcgagccccgggcccgcgagcgttggcgttggcgttggcggcgcgcgccggggcatgccccgcgcctagagcccggggggcgcgcgggggacgcgcggggggcccgggcggcggcgggcgcggcgcggggcgcgtggatgtggcgccgggcccgggcggcggcgggctccagcggcgggaccccttcgccccgcccgccttccccttcgcgcccccgggcgaggccgcggccgtgatcggccgtgagccggcggcggggggcggccggggtcggggccgcgggcgccgccggggcgcgcggggcggcggcgggggccgggggggcccgggcgcgcgggagcgggagcggccgggggagccggagcgcaccatggaggcggcggcaggcggccgcggctgtttccagccgcacccggggctgcagaagacgctggagcagttccacctgagctccatgagctcgctgggcggcccggccgctttctcggcgcgctgggcgcaggaggcctacaagaaggagagcgccaaggaggcgggcgcggccgcggtgccggcgccggtgcccgcagccaccgagccgccgcccgtgctgcacctgcccgccatccagccgccgccgcccgtgctgcccgggcccttcttcatgccgtccgaccgctccaccgagcgctgcgagaccgtactggaaggcgagaccatctcgtgcttcgtggtgggaggcgagaagcgcctgtgtctgccgcagattctcaactcggtgctgcgcgacttctcgctgcagcagatcaacgcggtgtgcgacgagctccacatctactgctcgcgctgcacggccgaccagctggagatcctcaaagtcatgggcatcctgcccttctcggcgccctcgtgcgggctcatcaccaagacggacgccgagcgcctgtgcaacgcgctgctctacggcggcgcctacccgccgccctgcaagaaggagctggccgccagcctggcgctgggcctggagctcagcgagcgcagcgtccgcgtgtaccacgagtgcttcggcaagtgtaaggggctgctggtgcccgagctctacagcagcccgagcgccgcctgcatccagtgcctggactgccgcctcatgtacccgccgcacaagttcgtggtgcactcgcacaaggccctggagaaccggacctgccactggggcttcgactcggccaactggcgggcctacatcctgctgagccaggattacacgggcaaggaggagcaggcgcgcctcggccgctgcctggacgacgtgaaggagaaattcgactatggcaacaagtacaagcggcgggtgccccgggtgagtggccccaggcctgggagctggggaggatgcg

SEQ ID NO: 45192 - DNA, 2173 bp, Homo sapien
cggacattaaaataccccggaatggtcttggaaagagccacttctgggagtcttcccttacccgccacacaccttttaaagagaaacctgaagacacctgagaagacaggcggcggcggcgatcttcagagagaagatgcccgagaagacaggcggcggcggcgatcttcagagagaggacacccgagaagacaggcggcggcggcgatcttcagagagaggacgcccgagaagacaggcggcggcggcgatcttcagagagagagatgcccgagaagacaggcggtggcggagatcttcagagagaggacgcccgagaagacaggcggtggcggagatcttcagagagaggacgcccgagaagacaggcggcggcggcgatcttcagagagaggacgcccgagaagacaggcggcggcggcgatcttcagagagaggacgcccgagaagacaggcggcggcggcgatcttcagagagaggacgcccgagaagacaggcggcggcggcgatcttcagagagaggacgcccgagaagacaggcggcggcggcgatcttcagagagaggacgcccgagaagacaggcggcggcggcgatcttcagagagcggacgcccgagaagacaggcggcggcggagatcttcagagagaggatgcccgagaagacaggcggtggcggagatcttcagagagaggacgcccgagaggacaggcggtggcggagatcttcatagagaggacgcccgagaagacaggcggtggcggagatcttcagagagagagatgcccgagaagacaggcggtggcggagatcttcagagagaggacgcccgagaagacaggcggtggcggagatcttcagagagagagatgcccgagaagacaggcggtggcggagatcttcagagagaggacgcccgagaagacaggcggtggcggagatcttcagagagaggatgcccgagaagacaggcggtggcggagatcttcagagagaggacgcccgagaggacaggcggtggtggagatcttcagagagaggacgcccgagaggacaggcggtggtggagatcttcatagagaggacgcccgagaggacaggcggtggcggagatcttcagagagaggacgcccgagaagacaggcggtggcggagatcttcagagagaggatgcccgagaagacaggcggtggcggagatcttcagagagaggacgcccgagaggacaggcggtggtggagatcttcagagagaggacgcccgagaagacaggcggtggcggagatcttcagagagaggacgcccgagaagacaggcggtggcggagatcttcagagagaggacgcccgagaggacaggcggtggtggagatcttcagagagaggacgcccgagaagacaggcggtggcggagatcttcagagagaggacgcccgagaggacaggcggtggcggagatcttcagagagaggacgcctgagaagacaggcggtggcggagatcttcagagagaggacgcccgagaagacaggcggtggcggagatcttcagagagaggacgcccgagaagacaggcggtggcggagatcttcagagagaggacgcccgagaagacaggcggtggcggagatcttcagagagagagatgcccgagaagacaggcggtggcggagatcttcagagagaggacgcccgagaagacaggcggtggcggagatcttcagagagaggacgcctgagaagacaggcggtggcggagatcttcagagagaggacgcccgagaagacaggcggtggcggagatcttcagagagaggacgcctgagaagacaggcggtggcggagatcttcagagagaggacgcccgagaagacaggcggtggcggagatcttcagagagaggacgcccgagaagacaggcggtggcggagatcttcagagagaggatgcccgagaagacaggcggtggcggagatcttcagagagaggacgcctgagaagacaggcggtggtggagatcttcagagagaggacgcctgagaagacaggcagtggcggagatcttcagaaagaaagcccagagttccatagtgggcgggtgggcagtatttcggcttgtgtggcaccagggcagggcctccgaacccatggaaagccttgcttcccccaagcc

SEQ ID NO: 45193 - DNA, 1413 bp, Homo sapien
gaggcgccgggcggatggacgtgtccatctggctgcgtggggagacccggggccctcagatggtgcgatgtctgaggctgccctcctcacattgatgggagccagggcctacttggcttgctgcccccaaggggaacgtggccctagataccgggggaggccccgccgcagcctcaagtgactgactcaggcccccaggtttagcacagctgccacaggcctggcggaaactccggatgggggtctgaaaagcctttgtggggtcggggcaccacacgggttgggctgatggcgcgctgggggcggggctccagggcacattgtcagatagatgaccccacggggtgggctgaggactgctggtcatggtgaggggtgtgctgggaccggctgggcagtgaccccgagccgcctccggcccccaggagctggagttcctacgcgtggccaagaaggagaagctgcgggaggccacggaggccaagcgtaacctgcggaaggagatcgagcgtctccgcgccgagaacgagaagaagatgaaagaggccaacgagtcacggctgcgcctgaagcgggagctggagcaggcgcggcaggcccgggtgtgcgacaagggctgcgaggcgggccgcctgcgcgccaagtactcggcccaggtatgcgggtggggagactgaggcacgcagcacggtgggcgtggagccgccgtgggccccggtggccagtcctgcccagccggaaaggccttggagcagaagccaggcccgggaccacgttccgtgcgtgcccccccgacgggcacagggtgggtggttgctgggccctgcgtctcgtgagcctgtgtcctagcaggtggaggaggggccggcacgcggcactggggagggacagggagcggcgcaggagcctcgggtgggggaagcagcgtcgggccggggcagggcagcgagcaggcgccgctgaccactcggctccctttcagatcgaagacctgcaggtgaagctgcagcacgcggaggcggaccgggagcagctgcgggccgacctgctgcgggagcgcgaggcccgggagcacctggagaaggtggtgaaggagctgcaggaacagctgtggccgcgggcccgccccgaggctgcgggcagcgagggcgctgcggagctggagccgtagattccgtgcctgccgccgcagcgccgccgacaacgcgggtgcaggggggcgcggctgggcggtgcagctccgcccggctccgcccctgcagcccacacagcacaacgtcttaccgtgcctattaccaagcgagtgtttgtaaccatgtagttttggaacccactgcaaaattttctactggccaagttcaagtgagtaagccgcgtcccccaactacagctggagacggggccagctcggcg

SEQ ID NO: 45194 - DNA, 1491 bp, Homo sapien
cggcactgggtcaggtttaggccggggtctctcgggtctcggtgttggcccctccgtgtttagaatcctcccaggccaaaccaaggcggcctccagggtcactcctgcacaggacagtggccggaactccgaaatgaccaccgacctgcgctggccgctgagggtccgacagaccaaggctctgggccccctaccccatcctgcgccccgtgcgcgaagtctgcggggtcactgctgcgcaggacagaaaacccgcagtggggccccggcctgtccccggccctggcgctgtcctggcatccggggaaatcctgtttctggctccaggccagggcctgcccctcaccctggagaggccccgtcggaggccggcctcgcgggggaagggcggtggcggaggaactacccaggaattccagcgccggctccgaaaccttcccaatcccgctccttcgcccgggccggaagccgcgctgggggggtggggaggggtgcacgtcccgggccccgcgccgcgtcctcagggccggggcggcctccccgacgcccgttccgttcccagtccgggggcactgggggccccgagtcaggcggagcgcgccgggccccacttccccacgcggaggggcagccccgcagcctcaggctcccccccgcagcctcagtttcccccccgcccccgccgcctcttccgctaccccaccctccctgccgtccggggcggcgccccccagattcgcggccagcgctggattccggcggggtggggcgggggcttccggcccgggggcggctggtccgagcagcaggcccgggctggggggcgggacgggaggccctgggagcttcctgcagcgtgggggcggctcccgaggtgggaattccgcccccgaaccggcgggctacgtgcgggggtctcagaggctgcggctcctcccgtcggtgggcgcggccgcccccagaggccgctgcgggaagcagggcggcggcaggaagcgccccccccgttcccccttcccccccgtacccctcttcccccgctcgtccccccttccccaccccaggccccgcggaggcggcgcgcgtttcacgggtttcgccgcccgcggcacggtgggggcgggggcgggggcgggggcggcggtgcgacccccagcggtggaagcgggaactgcagctcggccgagctcggggttggggggtccctgccaaccctgccctcccggaaggtcccagcctggcgggttcgggtgcttttctctctggggcgcggcctccctgttctgctcagttgggggtccgttcccgggaagaaccaccacaccccccatcccggcccgcaggccccagccgccaagtcgttgctggggaggtgggcgcaggccgccctctctccgtgagcccactcgccacaacccgcagggacctgggggactcggtggatccaaccacaggagaccatgagacacaggcggtctcgccgaggcctgc

SEQ ID NO: 45195 - DNA, 1062 bp, Homo sapien
cggggctggcaccggagcgtggaaaaagcgcctcggctggcccgggctcacaccaggaatgcggccgcagctgaaatgggggcaggagtcggctcacaccgcaaggcagagcaacattccagacgccggcctggaaaacagcgctcccctcgcagagcggcggcctcctcggccaggccacgggctcggccgcctgtgcgttcccagggctggacaagagcaagcctcgggggccgggaggaatgtgcttggccccgagtcagctcctttagaaaaaaaaaaacacggttctggggggcctcgccagggggacacacgttctgcaacctggcgggtgtgggccacagcaccgggcaccggggacagcctccctggcgggcggaggaagagccccacatggcaacgccacagtgtttccaagcagcccggtttctaggtgttcccaggaatccagctataccagtggtggccaaggcgctggccggggggccgagagctcagtgggcagtggctgaggagcccggccacaggccccatctgaccccactcctgaggctggcgtcccggcggatgggaagggtgggcggcaagggctctggctggtggccaccgtgcggcaggccgggcctcgacggccacgtgatctagccctgggccagctctcacttagggcctcggccatacgtacatggcttagccccaagtggcccctgaatcggatctcccttcgctcctcacccccagggctgtctccgccgagcacataaaccctggccgagcggctgcgcacaggtgccagcgcctagccgattcctgtcactgcagagatgtccccgccccctcctgggatggctgggacgcggtggaccggttgatggtgtgagggctgctgtgggaccacgggggacaccgcgtggcactccagccgctcccgtcaccaaggcctcactggctacagccccggccacacgggtgccgtccccacgaccagggtggctctgcttgttctcccgctgcgccagaggcagctccacggtggcatccagaccccagtgagcagcg

SEQ ID NO: 45196 - DNA, 937 bp, Homo sapien
cgcagtcgttaccgttccggggcggccgcctaggcgggtcccgacgcggcccgcgggagctcggggtgccctcgcccgccgctgccatcttgccgccgagggttctcttagcgaccagcaacgcccgcttccattggtctttgtcgcaagggggggtgtggccacgggcctagtccctgagcccgcgcaatctctggagcgaagctagccgggcccggagccagaggacgcagctgcgcctgtgcgcgtttccgccgctgtcgtctcttccgccgggaggcccgcccgccaacggcctgcgcgtctgcgccggaagcggaaatggttggagcccttggccccgccctcgcgccatcttgggggccctggaggcggcgccgcggaggacggagcggaagtgctcgctgcagcttcccggagccggagcgcagcgcctgcggccgcccgtgccccgccgtcctccttcccgcggccgtgagggagaccgcggctcggccgtagcggagctgcgaggtgccaggaagggctgcgtggcgcgggaacggccgggcagcgccgcctccgcttcttccgggctgtcaaggccgcgggcgggcggggccgcgctgagggccgggcggggagggccgtcggggcccgggtggccgcggggaccgtgttcccgacccgcggccctgaggggtacgggtcgcgcctcggggtcgggcccgggacggggtgctggggggtgcggcggagccctggggcctgcgagggtcgggggagcgggagaggggccgggcgggggctgcagccctcgagccacccgggccgcatctcgtccgcatcccctgcttggcatctgggggaagcgggcagtcgcggcccccacagcgctgcgagttgggctgtattccagagtaatgtgccctgtccccatcctgcgtccaggtcagcg

SEQ ID NO: 45197 - DNA, 2238 bp, Homo sapien
cgcctcccgggttcaagtgattctgtctcagcctcccaagtagctgggattacacgcacgcgccaccacgccctgctgatttttgtatttttagtagagacggggtttcaccatgttgtgtagactggtctcgaactcctgacctcaagtgatccacccgcctcggcctcccaaagtgctgggattacaggcgtgagccaccacacccggcatcttttttttttcgttttttaatcggtgatggggtctggccccgtcgcccaggctggagtgcagcggcacaatcatggctcactgcagcctcatccctcgggctcaggcgattctcttgcctcagcctcctgaagagctgggattacagacgccgccaccacgtccggctaattttcagattttttgtagagacggggtcttgccatgttgcccaggctggtttcaaactcctgggctcaagcgatcctcccgcctctgcctcccaaactgctgggatgacaggtgctgcttcattgagtacactggcttctgtactcagctcccggcctggtgaggcaggcagggcctggctgagcctacactggggtcagcagggcgaggggcctgggctgctgctcaggcctaggaaaggccggggtcagtgtgaaccggaccgaggtatgaggcgttcgcgccgcgggcgctctgacccctctgctcacaggggaggatcggagggaggcttgaagcacttgccaaggcctcacacctggaggggacagagtcttccccagccgctggcgtcagctggacctgccctgagctggggacgggaagggcttgggcgggaactggaggcccacgcaggtcccccgcggtgtctgcggcctgtgcctctggggccacctggccagggagggcaggaggtgccccgcacatccctgaatggccgcagggcaggcgaaggagactgccgggtcccaggttgtgggacgggcccaggcgaccgtgaccacacacggcagacaccccgcctccatgaggggcaacaccccctgggccgctcgcgaggacgtccggccgcgcccggccctcacccgccaggctgtgcagggcgccgcccgccgcgctccgcagcccaccgcggtagtactcgtccttctgcgccgcgcggatcacctccggggggctggcggcggccggggccatggccgcgggttcgggtggtcccgagcagccacgccggccacgcccacgcccagacgggcgagaactgatgacggcacgacgtggctctgcgtgcggcgcagacctctgcgtcaaggtgctggggcggggccggactggggctggaggcggggccagggcccgggcggaagcggggctggagtccgaaccagcgcagcgcggggcggggcagcgggaaggtagtcggaggcgcagggcggagcggagcggggcggggcccgcgagccgaggtgggggcggggcacgcgcgaggggcgctggcgaggcagcgggatgggctcgcggccgcgtggttgctgcgacctcggggtcctacgctgccaggggcccctgctctgctccctgcacgtccacgggccgccctcccactggggacagcgctgcggagtggagacgctgcaggcccatttacggctggggagacggaggctttcgcttgggtcttcgggaagccgagctcccagcgccggccgcggcggtcccgccctcgcgccctttgagctgcgcgggctctcagcgcgggttggccagttccggggagccggtcggtttgggggccagaggggcacgaggcgagacccgggaccttccaggccccgagcagccgccttccccagtaatcctgcgcgaaaagcacacggccggcttggtgtggacgcccccctggtgcccacgggaggcagggcctggcgggtggggggcagccgggaagccgccgcgtggttccaggacgggcggaaggtggccttccaccctccaccctccaccctgcctggcctgagccccgcaggtgctctggggaaccacatcgcaggcgctccgatccctctgctcccaggggacgagcggagggaggcctgaagcacttgccaaggccgcacacctggaggggacagaaccttccccagccgctggccacagctggacctgccctgagctgggggtgggaagggctggggcgggaactggaggcccacgcaggtcgcctgcggtgtctgcggcctgtgcctctggggc

SEQ ID NO: 45198 - DNA, 1297 bp, Homo sapien
cggggcccctgtcttggcttcttccagcgcctgggcaaacgcccagcctggagatgggaagcgctctcggccccgcccccttcccggtcccgccggctggggccacggggagccggagggaggcggagggggaggtgtggggagcggaaggccgcaggagcatctttgcggagaaagtactttggctgcggcgggcgcagggcgggccggctagccccgcgccccacctgttctgtgcgtcgcgctcgcccggttgcgcccgatctgcctccagcccggtgcccgccgcggagcccgcgcccccggccccctcccggcgcggggcgggcagggggtgtggtgcgggcggcacgagtgacagcgcgctcctcgcgcggcgcctccacggggcgcagtgtcaccgcgcacagcccgccgcgggccgcccgagctggcggggcgatgccgcgggagccggagccccagcccgagcccgagcccggccgctgactgcgcctcccggcccgcagcccccgcccccgccgccctcgctgccctcgctgcagccgccacggagacaatggacgcgggagccgccccgcagaagcacagtaggtgccgctcctgccgctgcgccgctgccaaccgggatgcgcgggtggacgcgcgggggcgccgcagccctggtgcgggtcggggctgagccgcctgggcttcagactcgggagcggaggctcggatcgcggtggcacgggcaggggtgcgggcgcgggactgtgggcgggacgggcggagcggtcttgagctctccggatggcctcaggtgcggggtgagggatctgggggccgcccctcggcaaactttccttccccgggcttctgcggaggtcgcactggggctgtgaccgtgctgagaatgacccctgctgagcccaggccgggcaccccgatccctgccggatggtgccgcagggcaccctgtgtgggtccgggaggtgctgcgtggacttgccgcatggcacatctgcctgggctgcaggtgctcatctggggggagccggcctctccccacactagcaggtggggtgcagcgggcactgcccgggcaggcgggagctccggaggccctggggcggccctgctggatggtctgtaggacacgggagggggaagtgtttgagtgtccactgctgaggggtctcctgggctctggacctgccggcagagctacagggtattctttagggagatgggctctgctggagctggtggaggaagatgccaaggagataagaggcttcccctcccctccgctccc

SEQ ID NO: 45199 - DNA, 1372 bp, Homo sapien
gcagaggccggggtgagcaccttggtcggcggtggccgacttcccgaagctgctggcgatgaggttcccgctcagcccgagagtctggtgggcgccgccgtagacgtcccgcaccagcatgtccacattgctgtgctggcccctcgaggccaggtgcaggagctcgtcaaacttctgcaggacacggcgagggggcgggtgaggcgccaggagctgctggaatccccacgaccccagaaaccaagcccatggcaggaggcacgcgcgggcagggggtaaatgggccctcatcgcgtgggaccaaaggcaggaggcggcaagcgggaccctcgggccacccagccaggatagaagctctgggttgctgggacacccaaccctcagggcgcaaagagtgaagccgcagaggccagagacccactgacgcgagtcaggagggaggcccggaagcagcttttgcaccgcccagctgcaggccttcgggggaaggaagcagacatctccgcagacccctggaaggtctctggcagctgccgcataccttcgttttggtgagcagagcgccaagcccccagaaggtgccgcctccaatggagctgccgccgacccactcgaacctgtcctccgtctccacctgcaacagagccagggcaggtgtgccctcagtgggccctcagccacacaggctcccccgccccccgccccatgtgctgcgctggggtgaaccccgcccccaccccaaccgccagtgggaggactctcatggccaagcctgggggcgctgatgcccctcccacagaggctctgagctcacagcctcgccacccccctcccgcccactgggccccatccatgtgcccagccctggctcctgcacacagcgagggcttaacaaactatggctaaaccatccactcattcattcatgaagccgggtcttaccttcacgatggagactccagagccgatattgacaagaagataggggaaaatgtgggggtggttggtctggaaccggaactcagggtcggaatccttctggtacacgaaggcctcatgggggatgttcttgagcacgaagttgcaccccttaatcaggcacgtcatcacgtcctccttgtcgactctgaaaaggaagcgccaaccccttaaagagtctgggccacagacaggtgcaaccatgcaagcctgcctggtccgaaggggcagccatgccccatgcgcaatctgacacacgagcgccagggacgcggctctgggacacccagggactcgggggcagacacatgttcctttctcgcccttgagatccccactcacttcagccgcagcttctcttcgatgaggtctttgaacttgtaggccccgcccc

SEQ ID NO: 45200 - DNA, 1383 bp, Homo sapien
cgttcctcccctagaggtggctgggaggtgtccgggagtcaggagcgtgggaaaaaggtctagaacagagcctggcccgccgtcattactgagagcacagccatcaggcaggagggtctgcagcggaccctggagaggccagggcagaagtgcaggccgccttaaaggccacggaaggcacgggtggcttttaaaccagaggcacgagttcccaggtcccacgtccacggccgcctgaactcacgcccggcgtccactctccagagagcggggcctgtgcacggactgtccggcccgcgggccacagctggccacgccgcgggaacgcgcggccttttcggggccactctgccaagggcttcccgccgagctcgtcctcgtctcgaccagaactaaggaccccaaatctcaggccagccaccagccaagcggcggagccggggcgcccagatgccgatgtggccgaagacataaaattccgccgaccctcccacctcgcggcgggtaacgctggaccccggcccccagccacccaggacggccgcgcgaactaccaggcccggcaggccccgctctggtccctgcggcgcctgccggtagctgtagtccggccgtcgccccgagcccgcgcatcagcgaccctgcggactacaaggcccgtgaggctgtgcgcgggcccgcggactacaaggcccgtgaggctgtgcgcgaggcccgcgcccccgcccttcgtccttcccgccgcccccgctcgccggcccaccgccggcgccccgcccgcccccgcagcccgcgcccggcgcccggcctgcggctacctatgtcgatggcgaagcgcttggcgttctccaggttgcggaagatctcgtcggggggcagcgtgatgctcttgtccagactgtccccgctgctcccgctgccgctcgctccacactccgccattttgaaagtgcccggccagctcatcagccatggagatatatgcgcatatatttgactgccaaacgccccctcgcatagattatgttaatgaggcgccggccccgccccttccctcccccacccccggcctctgaggtctcggccgctacagggcgagctagggccagtgctgggcaggggtccgagaggcccggggctgcgggcgggcgggcggttatcctccagagatcgcgcatcagcacagaacatctggactgatgttcttttaccgcgctgtccacaggcttaactcaagtgctctgagccctgctgagggaggccgcagaggccgcccacctgcttctaagggggcacgtgggtctgcagactgtcagagagccctgcccttcagcgagtgcctgctgtaagcttggccctgcacgccagggcgaatgtgatgcg

SEQ ID NO: 45201 - DNA, 1319 bp, Homo sapien
ggccggccagcttggggccagagccttccggagaagggcgcgtccaagcccggggcggacgacggcgggaaggcgcttccctacaggcgagaggagcaggctcgccctctggtcgtcgggccgcgcgcccgcaggtcccgccgggtcaccagggccgccagaggccgcaggcgggctggtgcgcggcggcggcggcggcggtggccttggcggagagcgcgggcgggggcgcggcgcccggcgccttgggctccttggcgggcgcggcgggcgcggccgggggccgctggaagtggtacagcagcttcatctgcgtgtcgctggcggcgtggagcgtcaggaactgcacggcctcctgcaggcaccacgagtagccttcgctgtagtcctggtgcaggctcttggggccggcggcggcgacgaaggctgcggggagacgcggcggcggtgagcgggcggcggggcgcgggggagccggggcgcggtgggaactcggggcgcggggggcccgggcgcgctcacctttgctgtgcttcaggtagctgacagccatctccaggatgtcggccttctccagcttggagttgggctggtgccgcgcgaactcctgctccagcagcagcttcagctgctcgatgctgctgttgatgcggtcgcggcgcatcttctccaccaccggcttccgcagctgcgggaggagggggtgtcaggctggcccggcacggcgcagggacccccgaggaccggaggccgcggggacagcgcgccgggcgagtctggtacttactcggtttttctctttggggctgagcagctccacggccacagtgctgggggccatgcctggcgcggaacaggcgacgaggcgacgcggggaggccgggcgagacgaggcgagcgggcgcgggcaaggccaagcgcgtcccgggctggcgcggacaccggccccgcgcgccgacgccctatataggcgcgggcggcggcctggcgcctggagtccgggcgccgcggccgttcccacactccgcggccaatggccgggcgggccgcacaaaggcgccggcccattagcgcacgctaaattgcctgtgaattggcgcgggcacaatgggcgctccccaaggagcaggtgggccgcgcggcacaatgtccgggctgtgggaacgcgctcgccctcattagcatcccggggcctgatgccgggagccccgcgcctcaatatgctgccttttcccaggccgccaaacgggaggggggcaggaaggagggccccctcccccgccctcccctccgctcccctcccctgcctctccccagcg

SEQ ID NO: 45202 - DNA, 681 bp, Homo sapien
caacctcaggctccccctgcccagctttccgggcctcagtttccctagtgtaaaaccaggctgctatggggaccatggggacacctgtggggttggttcccccggtgcgcaggggtgggtggtgggaaagcccgcggcccgcagtctcacgggcgcggggattaggggccgtccgggcccacgtggccgcacgccccgccccgccggtgtccccccaccccccgtgcgccccggggcagggccgggtcgccgtcccaagctggttaaaaaccccgcggtgtcagagagcagctcgttcccaacctctgaaaggcagacaagccctttattgctctattataacgcggagccagatggtcttttgggagttgcccccccgcgccccccgccgccgccctcattcattcagactcagaccccggcactaatgccgcgggggggcccaggcacgcttccctcgccgcccgcccgcgcagtgtgggaaccgccggcgagcgcgaacccacagccgggcggagggaggggcttggaaacccgcgcatcggagagctggggaggggtggggagggctgcgtcccagctcgcctgggccgggagggctctcaagttaggggctaagggaatgctcaggaggctcgtccccagccccacaatccctggttcttagaggctggggaggcg

SEQ ID NO: 45203 - DNA, 1259 bp, Homo sapien
cgtatgggcaggctcctcctcccggtcaggtcccacgtgaccccccagccacgcctacccacatcgccctgctggaggccgggggcggggggagcggggagtggggggtgtggggggtgaggggggtgggggtgggggtggcccggcccggagctagggggcggggccgtgcttcttctggccctggcctccaattggctgccgggcgtgggaaagcgtgcaccactgcctggcgcccataaagacgcctccaccacctgcgccgccgccgcctcccggccgccctccgccccgcgcgctcgttgaggccggtgctccagagtgaagagcgtggcggtgcggcggtagcgcagggccctcctgcggggccaggcaggggcgggtgggcgctccttgccacctttctgctctccctgctgtccgagaagttcgtgcggtgccagcccagctcccagctggggacagaacaggaaacgtccccggcgagcctggcgggggtggcggcaggggtgtctgtcgcctgcgctgggcaggacgcgcgtcctaccggcctcccactccgcgggcctcaccagccacctcattcccggagcccgggccgccgagagcgccgcggatggacctcagggaaggcctggcgcgccgcctccgggaagccttccggccttctccctccaccgagtactggggagtctcaggccacggtgaatgaagagcaacgggccggagagacctcggcctctgcccaggagcagcgcccagcaaccccgcccacaggggacccggtggacgccctggtggccactttgccaggctccccatctcccagcgaaccagagaggatttccgttcccctcctgcttggtgcctagcgccagggcggggcgtgggctgagcagcccctcccatggagggagcggccagtctacatattggaggtggggctctggggaaagggtgttgttaggaaggcggtttgaggcagcgggaggtggggatgcgcccggcggggaggggcaggtgtgtggggagggcctggggagcgcctccccagccgggcagcgcttccccagccaggccccgcagctggaccccggctccgtccagcctgggaaaggactccacggtttatgctgaagtggtggtggggtgggtgaacgctgcgcaatggaagggcatggccctgtgctaattgccccggggtgtggggctgtggaggcactgcgggggggatgtgctgtgtcagttgggcaatggcg

SEQ ID NO: 45204 - DNA, 2330 bp, Homo sapien
cggggcctctctttatttggaatacagtgtgggggctcccccttccttctccagcccgcccaggcccctggagctgtcctggggcctggggagtgaggacccgtgccagcagcacagactctgccaggccgggcccgctcaggtgggagcccaggccgggtgaagctgtgacccggccctcaccccaactcggtgacaaaagctatcacagggctgcagtgggggaggaacaggacgcatctgccaggcacctgacccgcagtgcacttctgggagctgtgcttatctccccggggtctatttcgccccaaggtttggcgggttaaaagctgatatgcaaccggcacgacatgaacagtatttcatgattaaagacatcgcgtccatgtataattgagatgctgccgcatttgcggggattttcaagcgaaaaccaggccacgtggaaaggctaagccctcgcacccccccgccccccactgctgggacccccgccccgcgggagaccccggcccgcggtcccctatgcccgcgacccctgcgctcaccctctcccctcaaccctgagtccagcccagtctcgcgcgaggccgcagggagacccccgccgctccctggaccacccctgggcccaccgtacccagccgctccccggcgccccccgggacgaccccgagccggctgcccgcctcccgccgcattccgcacaggcgcaccgcgcaccgagggccgcaccgcccagctccgcctgctgcgccaatggccgacggggtccaagtcggcggcccaacggagaggcggggctaggggcgggaccaggacgcgggacagcaactgtcccgcaaggcccggattgaggaggcgggagggaccgaagcaggcggacccaggatttggcgccgcgatctcgaggcttggcctggagtaggaggggaaacaaggcgggactaggggcgaatccgagggggcggagcagggctcggggtgcggtcgggggcgtggccggggcgcgctgcggccatcttgggggcgggcccggggcggagacgagcccgaaggggcggggcctcggcggcagcaagaaaggcgggaccggggcatctcggggcggggcttggggctggatctatgagccgggagcggggatccaggagcgaggagccgggagcggggaacagggagtcggggagccgggaaccagggctggcagcggccgccatgagcacggtggaccttgctcgcgtgggcgcgtgcatcctgaagcatgcggtgaccggggaggtgaggccgggtggacgcagggcggtgggcgcgtccctggctccttgcccgggcgtcctggcagcgatggggtggtgggggccgcggggcctgggcggggctgggggcaacggggcgcgcccatgacccagccgcccggcaggccgtggagctgcggagcctgtggcgggagcacgcgtgcgtggtggccgggctgcggcgcttcgggtgcgtggtgtgccgctggatcgcccaggacctcagcagccttgctgggctcctggaccaacacggcgtgcgcctggtgggcgtagggcccgaggccctgggtctgcaggagttcctggacggcgactacttcgcgggaggtgcgtcctgttccccgccgcggcggcgcacatacccttccctaagctcagggcgttcggggccctttcctgcccaaccccggcccttctgtctgctggagcggccttgatatgcccacgggtcagcgtccctcatctctccctgcctccccgccccgcagctggtggctgggtggtgccctgcacagacctgggcccagcagcagagtctggacgagctctgccccgccggctccacctgttgcctctgggactcagcccctcttctgaggggaggggggacactcagccccgttttacccctccctgccctgcgggggtgggctgagcacggagggtgggcagaggaacagagggtcggaaggaggagggcgattctttgtggtgagtgggttgggggctggttctgcgcctggggcacacacatgtggcttccgctttccagagctctacctggatgagagcaagcagctttacaaggagctaggcttcaagcggtgagtgggggcgggaacccttgggtagcgtggggtggggggcccaggggttcccaccgctccctgccacctcctctccctgctgccctctgtggtgctgtccactcgggccttcctgggcaaggcggctctggtggcactgttgaccagcccttctgccaggccttctcttgggtgctgggtgactgtaatgagccacctcgtc

SEQ ID NO: 45205 - DNA, 834 bp, Homo sapien
cccctgaggcactggtgcccccctcccctgcagcgctgatgccccccctcccctgccatgctgacgccccctcccctgctgtgctggcaccccctcccctgccgcgctgatgccccctcccctgatgcactggcgccccctcccctgccatgctgacgccccctcccctgccgtgctggcgccccctcccctgccgcgctgacgccccctcccctgccgcgctgacgccccctcccctgccgcgctgatgccccctcccctgccgtgctggcgccccctcccctgatgcactggcaccccctcccctgccgcgctgacgccccctcccctgccgcgctgacgccccctcccctgccaggccccaccttataggcttgccgcacccctccgttgtcagcaatgttttccccaagggtgttgaatccgttcacctgcgcacaggagacaggattggggcagccccggccctgacttccctctccctcagggccagggctggggctccggtacccccgcagcctgggtgctggtggcagcgctcacgttctgttcgtctgccaggtcccaggagtagttgccgtactggtagatcatgcactctgactgctcccggaagtgctgggtggagaagttactccaccaatccatcatgttgccattcttgtcgaagttccggcctgggcaggggcagaggagggctgcccacatgcccctggctgcactgtgcctggccccacggcagccactgtgcctggccgctcctgcccctcctgcagccagccccagtacggagagcccacagtctgagtaggctgagcctggaagagcatcgcg

SEQ ID NO: 45206 - DNA, 1174 bp, Homo sapien
gtgaggacccacccaccttccggttgctgccgccgttgaagtagtactctcgggagggcatgcccaaggtgggctggtctatctggaaatacagaaggtgtgaccctgggcaaggggcccggggtccccgcagcctggctgaggcaggctgcagccgcctccccacaggactgtgccccgtgcacacgtgctctgcccaggagctggtggtggagcttgtgccggacccgggaggccagaccctgccccgagtgatggtgggggcgctgggctggactggagagggtggcgggggtggggtggggaggggttcaggctgtcccgggcctcgcagcacccgcggctcccccagagtggggcgcgtatttgtttcgtgtgtttctctttggcctccagcccgtggccagcagtggatccctgaggtcaggcctcctgccccggttccagccccgctgttcaggagcccccgcccctctgaccagaaccgggttctactgtggcccccagcttggccaggaggcccaacagaaactccagcagcagcagctcgttcccgggcccacggacgtggacaggagccaggagcccaggtcccaggagaccccggagctccctgtcggcctggcccatccttctgctgtgctgcaagagcccccagccaggcttggggaccctgcctacccctgcccaccggcgcggctcgtacgtagatgatgtgccggctggagttctggtcgtcgttccagatgaagaggtcgatgaggacgcgcctgttgaactgtgagttcatcagcgccagctgccgctccagctcccactcgagtcctggggagacagtgccccgcactggagactggcgggccctggggccccagcccggccccttgtcggtgaatctggcctccggagccaggaactagggggccatagggtggggagctcacctgtgcgccttaggggctgggggatgtgggagacactttccctaacagcccaggagccacaggcgggcccccaggtgaccggagggggttgggagcagcatggggttgtcagggctgccagccacgtgaggtgccactcctgcccccgggggaatggagcacatgctcagagtggggagccctggggccagggcctggccggagcctggctggggcctgagtgtcgagcg

SEQ ID NO: 45207 - DNA, 1526 bp, Homo sapien
cgcccatggaggtcgcaggacccctctgtcccaggggagaccctagagggccaggggctgcggtctgggcagcagccacactgtacagtggccagccatgcagccccgggccgggacgccctgcacatccacaggcagcacccacttctgcttcacagacacagcctcccgcaggggtggagggatggtcccaggcagtgcgcagggctccagacatgagggggcattctagtaacacaggctgaggcgccccattgttggacctggggtgcgaggtccgccatgagctctgagtccggtgcctgccacggtgggagcgccctacgcacctgccccgggggtgagcattgctccccgatgtgtgcgcgctgcccggtctcagagggaccagggctgtgcctgcggaggggctggcaggggcggctggaaggtgaccaggtctacgggtgcctgggagcccctgaaccaagaggggagatcaagggaggggccggcgtgggggcggggggagtgttcccgggacagccgggggcggggggagtgttcccgggacagcccgaggttccagcgagcagccctggccacgcctttgtctccgtgggaccccagactggccccttcccgccgtggtcccgtgacctgacccggccttgagcggggcgggggcggcaggaccctcaggtctctccgcaggatggcagcgggggagtgaggcagccaggtgagcccgggcggcgggagggacacggacgccggtggtccccagccggggctgcgcggccaggcagggagggggtgggcggaggggcgggcgacgggtctgcgccccccaccctccgggagtccggcggaggcggaggcggaggcggaggcgggcgggtgcggagctgcagaagcagcgcgcgggagtcggggccggggcagagctttctggaagggaccgcgggctccctgcaggtcagtgcccctcccgccgcctctgagtccgcagctcggccccgggagcccctgggtgcccagtgcagacccacctgccccatctgacgggcgggctcgggctgggggcaggcggaccctgcagcaggtgcagcggggcgagcgcggagagcgggcacggggacaggcgggggcggggcacccgcactcacctctgcggtcggcgtagaggacacccaaggccaccagggcagcggtcaccagcagcagcagcagcagcagccccccctccaggaaccccgggcgcttctgccctgcacggccggcgctctccaccatccccactgggccttcggacttccccatcagcagggctctggacgggagagcaccgcggaggaacctgcaggcccagggcaggggagaggggagaggggcgtggagctccccgagcccggcccgaggctggaagggccggatgctggctgggagcgggcgctgggtgcctttggaacactcttcccgtctccctctccaagctcacaaccctgggtgactgggtcccgggactttccacactacccctgggc

SEQ ID NO: 45208 - DNA, 1067 bp, Homo sapien
cgtgcaccctagcccctctccctggggctgctggacggagggcacagcctgtgctgtgggctgctgctggccaggcctgcctgccccccccactcctcccgggcactttcctgagcccacccaggcccaatcgcctcatctctgacccagttttttcacagagtcaaccacgaccagaaatccgctcgcctcgctgggctcctcctccgctcaagaatctgcaggggttccccgctgcctgaggaacacgccaaggtgcaggccccgcctttctcgctggcgctgcctctcttccagcagcccggcggtcctcgacgctacctcccccggggggcgcagcgcacccaggaccccgccaggcttggccgcacggggcgaagccgaggcccacgcccggggtccgtgcagggagcgagggggtcccacggccccggctttgctgctgggctcccgcagggcacagtgtggcctcttctgccagctgtgagcggcgctgagcagggcaggggctcgaaaccccgtccctcgcctgcggtgcggcccgcgggaccgcccctctccgggcggaggcacctgaccccgacccgtagttcacggcccggggtggtagtgaagcctcggcccgcgcaggacccgcacatttgggccgggtccatggcagcaggagggcgaggccccgagcagctgtcggaccccgggagcccccaggccgccccagtggggaagggcgctcaatccgaccccagactcccctgagcccgcggctcgggccgcgcaggcgcagtgccacccggagggggccgcctgccgaggggcggggcgcaggaagcggggcgaaaccactgttggctcatttccgggtgggtccccgtctccaggcaaccatttcgcgtcctgcagattcttgcctgtgccgggagccgcctcctggcgccgcagcccagccgtattctgcagcctcggagacccgcgtccagccccgcctccgggctcggtgacccccgttcaggagaccccatctagccgcctcctctgggctccgggaccatggccccagccaggcttcc

SEQ ID NO: 45209 - DNA, 934 bp, Homo sapien
cgcaggaagcagcggccccagcgtgcccgggcgggtcctcacccctcctgcgtggtggggccgcccgtctctgcggcctccctccggccctgcgctctggacggcccggcgcgtggagatcgctgcagcatcccacgggcctcctcccgcagcaccaccagcagcagcccccgctggttccagggcacgtaggccttggcggccagcagcgcctcctcgggccgcagcctgcaggcggtgacatagtccagcgtgcccaggaacgcgctgcccgccagcacccgcagcagtccccggccgcacagcgcgcgcacacagccccccgggtgcggcgccccctgctccactaccgtctggaagtcctccatggcgcgccgcgagtccccggcgtgcagcgcgcagaagccgcgcagagccaggagaggtgcgcggtcccctgcacggtcccccgcagggtcctcagggcgtgcgggccgcagcaggcgctcgcacatggcccgggcgcccgccgcgtcccctgccagcagcaggcactcggcgaggcgggctcccagcgcgggtcgcgccccggcaggcgccaggcgaagcaggacgcggagcgcgcgggttaccggggccagcagctcgcggcccgcatcctcgcggagctcagggtggttccgcacggcttcctggaagcgggcgaagcccacgtccgcggcctcctgcgcctgagcccggacgcgctcctggtcctggacagagaacacggcctggaactgcctccgcgccccagaggggctctcgcggaaggcctcctgcaggttccaaaacacgtcctgggcccggccgtccaggaagaaggccgaggccgcgcgggtgaccagcagggcggctcggcgctcacctgcggagagaaacagaggcgtgggttctgcctggggggccgactccc

SEQ ID NO: 45210 - DNA, 792 bp, Homo sapien
ggggcagctttcaccctggctctgcaggggccatgccgtcctcctaccttggggttcgctgccggtgggatgggcctcgagggcccggctgcatgctgccaggcagtcctcaaacctgccgctgtggagcagagcttcaggtgacagggtgtcactccgggtgcccctggggtccagagccgccaggagtcgctggccaccggtctcctgctggccggcactgtgcccagcctccgggtgccccgagaggtagtcctggagggcactgagcagcgcggggaggtggggccgctggtgggtgcgaatgaaagctaccgtccggtcggcgctggaggcgaaggcctggagataggcggccacaccatccgctgcctgcaccccggacaggacccaggcgagggcgcgggtcagccgcagctccaggacttgctgtgcatgagagtccagcagggcgctgcagcgttgcaccacttcttcgtgacgcccgcgggccagcagacctgccagcaggtgcaggatggcggcggggtggtccgggcagagggcgccgaggaaggcagaggccagcgaccctgtcagggagaccactgccatgccgtcccagtggatggcggggatctggctgtccccgcggcaccaggactccagggtggccaccaccgccgccccccgagcctgggccagggcagtgcgcacactctgcagggctgagggggcgtggcagctgaatgcagccaggtagaaggcggtggccaggggcagctcccccagcgccagatgctgctcccctcc

SEQ ID NO: 45211 - DNA, 1514 bp, Homo sapien
cggatcccgaagcctcagctccccaggccatgctgcggggccccgcccagatgtgtgggaacgcggctgccgccggtgccaaaagacctacgtcctcggaagtgggtacggggatggcgtattccctcccgcgaggttcgttgtacctaggggagcctgggtctccagtcctcccccgacccgcttccccggcaggccctgtcccccacccccagcagccagagcgcccgggcagcccctgccttctccccagatcccctccacactctgcaggatttggggtgctgggtggtgtcatctcaggttcgagtctgcgcgaaacctccgggcttctggagacccaaagggacctgagaggaaagcccagggcgggccagactctgcggtgggggtgggaggagggagaccccaggggcggcggagtcggccctcgcccctcctccacccagcgggcgaggagagttccgggaaggccgggggagggggagcgaggggaggagacagggacgggccgggccgcctccagagccgccgtggggcgcgccctgtcccgcacgcctctgacccccgctcagcaaacgaggcccacggggtgggcggccttgggcctcctcctggcagcttccacccagccattctctccagccagccctgcaataaactcccggagaagcacaggcgcgcctggtcccatttcacagacgaggaaactgaggcgtggaaaagaaacccaccgcagctccgtctccacggtttcacctgcggggtattaatctctcaggatgaaaggcaaaatttggttttgaagctaagagggccggcagtggggggcagggcgcgctgcggagagacggcaggagcgggctttgcaagccgagtctggattccggcgcgagccgattccgggaactggcttggtgacccggccgccggcccgtgtcccgggctctgggcgtttggggacacggaaggcgggctcccacctggcgactcccggaatgtggccgccgggcccggaaggctacgaggctcgccattttcgttgctgccagggccccgcccgcgcgcggccgaattgggatctgaaggcagcggcagcgtctacgcaagcagcgttctggagcgtcgctctgccaccttcccgcgcgcagttccgcgcgagccgcaggacgcgggcgctgtgggtaacgaagttgctcccggtgtgcgcagaccggcggccccggggttgcgggcggcaggagggaccgccactccacggctgcgggcgcgcgtgaacacacggctgaaggtcataggcagcgcatccaggcaacagcattcgttggcggatttttaaaggttcttagatcaagagggaaagcgtgtgaaaccgattccgtttattgcccccagcggcgggggagctccccgttgcagacacccagcggctcggccactgcagcgtcctggcccagtatgggccgcacacgagtaggagtcgttgggggcttcctgcaccttctcagtgagcc

SEQ ID NO: 45212 - DNA, 4310 bp, Homo sapien
gccagtgagcgcttcctccatccggggctcgggcggcgagctggctgcaagactgggcaccctggagccgtgggagccttgggagccgaatctgggttcgaatctgagcagggaagcggtgccgaccgcggaggatccaaggcagaaggcccagcgcaccgccgccgccagctcctgcccaacccggctccgctgggcttttcctctggggtggcgccggccccgcgcccctccccatccggggcgcctctgctaggacaccggggtctcggggtttctcagggctgctgcgtttcacctcctttaacgcggaggcgcggagttgcacgtgtgggtctcagtggagccgccacaggtcttattacacaacaaagggcagggagggcaaggccaggagcctcgcggggcggcgcagagaccccgcatcgcgggcgcgacccctgcctcgggctcaggctgactctgcggcagctccaagtcccgttgccgggcaggacttcggtgctccggaagggtgcggggcagcaacctggccagggcagcgcctcggtttccttccaattcattctcgattcccagatactcagatgagaaatccgcactcaggccgtcaggctcctgggcccgggccaccctgcctgcgctcagcccggcccctccgccgcagcgcctcggagtttgggggctacaggggaagaggaagcgtctggtcggctcccgtccgagctgctccacctgcgccgctggcctttccgcccgctacgcacctgggccccgagaggccagaggggagtgtccccagtggcccgggtccccgaaggtggcccagctcgggcgctcgcgcagccgggtactcaccttgggggcgcggcggcaggagagcgcgggcggagaggtgcgggcgccctgggacgaccagccgaggacgcctggtgtttggacggctgcccccgcgctgtccccccgtgcgaggcgtgttggcctccgtggcctcgcgagggaccgagggcggcgggtccgagtgccgcccgccggcctgggcagtggcggagcgcggagctggcggcgcctccgctgttgtttttgagccgcgaagcccgaagcagcagccgttgggtgggggcgaaggggaggaggcgggggccgggaggcgcgaggggggcggtggggcccggagggggcttcggaggagccgggttctggcgcgcgagccccgacgccccctccagcgatcgcagggcggggacgggggccgaggggagaatgcaggagaaaagcgggccggggcgacggggaacgcaaagcttttaaattagtaatcaaacgcagtaaaacggagcaaaaccagcccggactcgcgtccgaactatcggcgcgtgtgccccgagatccaaggaagtcgtgtggaaaaccgcagccgccgccccatcttcggccccggctggggcgggagcagcagcgcgacgcgccgcgacgcaggggcagggtggggggatagtcacctcgcctccggggccacctgggtccttttaaagtgtccggggtgcgggccccgggcgggagcgccgaacacggaatgttttcttaaagggccagttccgagctgcgctgaaaagggggggggggagaggggggagagataagtgagacgaagaccgagaaggccgaggagagccccccaatcccgcgccgaggcggcggcggcggcggcggcggcgcgacgatgaggatgatgaatacattgcaaagtttttttggccccggcgaggggtgtcagattgagtgctctgtgcgcatgtgcgaaggtgtccaaactgacaatgctggggagatgaagatagtgtgtggctgcttctggactcaaggaggaggagagagattccgcgagccgacaccatgcgatccaaggcgagggcgaggaagctagccaaaagtaagtctcccgcgctcggccgcgccgcgccgccggggcccgggccgccgggccggggcgcccgggccaggggtgcgcgtcggggcgcggccggcgcgcctgcggctccgggcccccggctcggccgcgcggcccggggggctgctccgcctcccgcgctccggggcgaccgggctcggcgcggaggctcggggcgcccgggccgcgcgctccccgaaggcgccggccccctccccgcggaaccccctccccccccaccagtgtcaggcgctcgggcccgggaacccgaggcgcgcggtgggggccggggaggggggcggagggggagggccgggggtggaggggagcgaaaagtgaaagttagcgaaaagttgacgaaaggggagagcaactttttcctccccgctcgctctctccctctctctctccgagtggctctcagtcctggtcaaatcatattccgggcttttgaaatagtgggcgctagagcaccgcctttggcgtccgccagccgggcgcagaggagggagaccccgagccggggaggggcggaggagggggcgcgggccggcgcccacccggctccgcgggcgcaggggcaggggtggcgacggcgggacagccgcagccacttggggagcaaaatggagacttttgcccgggctgggaactgtggtcgtgaagtttatccccggctgtgccccgcgtggtggagggcgctcctctgggacgccggcagcctgcgcgggccgccggggcgacagtgcctccgacaggagggacccacccggccacctcccgacccgccgctgccgccctcgggcccgcgtggacccctctgtacccgcttgcctggcacagccgggcccggcggggacagagctgccccggccaggctgcccggtcctcggtcttactttctctttcgctccgtctcggccgagccccgggctccgcgcgccccgcctgccgccagccggtccttgccgcgggccgggtgctccagccacccgcgccctcgcccgccacagcgcctccgagcagcccgcgcgcaccccgcagccccggtcgccggcgccatccgcggtgaggcgggcgggcaggtgaggacaggcggagccgcggcccggccagcgcggctcccgcagccccgccgaagccccggctgcagcgaagcggccagcgccgcgcggagcggaatcggcgccgcctgctcccgccgccccctcctctgcaggccgcccgcccgcccacccgcagaagaggcgcccgggccgctcccctcgaggtccccgcccgacccacgccgttccgtccgcgcctccggggccgggtccctccaggccggcctcgcagctcccggggccgagcccccaaacgtgagccgggtgcgcgcgggactcgcggcggttttccgaagctccgctccctcggctcggggcccgcccggctcgtcccaacagctgccccgcggccgtaggccccgcgctctgtgcaccagggaaaagcagctcccgagtttgtgccggacgctcctgcgccccgccatcggccgttcccggcccctgggtgaggcgcccccttcccgccgcgctccgctgccgggtgccctcggcctcggcctcccgtgacctctgacccctcttggtgcgaacaagaccgggcgtttcgccgccgacgcgaaggggctgtctgtgcgcggcgttgcgggccctccgcgcgtggggtgtgcgtgtgcgtgttcgggttcggttctgtgtgtgcaccgcgggcctgctcagagtcgggaccaccgggctgcgtgtgggccgccaggtcaggccctcgcccaggatgggccctaagctggaacgagaaaggggaaaccggccgcgctgacgccggggccttcgctgcaagcgagaggcggactcggcgcacccgcgcggccctggaaacttccgagaggccccagctctccgccggctccacctctgccaggtggggaaggtggcccgggaccgggtccgctcaggaccagaagtggtgcctggcagccatctggccaggaggccggagagccgggcccagcgggagcgccgagcgctggcttccttttcccgagagtctttagtgaggaaaaaccccatgagaggtgactgccaggcctcggccctctgtccacacttggccgagcgctgggaacccctccttccaggctccacagctgggaccgcttgtcccaggccccccaaggtggctgaggcaggttcaggatcacactgcctgccctgagcaagaaggcaggatccgctgaagaatttcatttcatcaggcgatattttaagcagatgtgaacttccccggggaccatagtccattacccgagtcagaggcg

SEQ ID NO: 45213 - DNA, 650 bp, Homo sapien
cggcgcgggaggaccaggagcagctccggcgacttccccgtgcgggaaggaaacttcgcgagcgaagccagctggctggggcctcgccgcggtgcagcggcggccgcgggctcagaatcgagccaccgagggctgcagacggcgtgggccgggtcggggagcggggcctgggggaccccgggccggccggtagtctcggccgacttcccactccccgcgcacaaagtcgcggccaactaccgcggagcagcgcccgcgtccacaccgcgcagcctggcgccccgaccctggcccagcgggagcggcgctctccccttctagagccccagcttggaccccggggtcccctcctcctggcctcccttgcggaggagggcggcctccgcgtccccaaccgccgaccctcgacctcgtgcgggacaccgtgggcgccaggccccccgcttgcctgggttccctgcgacatcccgacccgcgccccgagagacgcgggagcgcgcgccgcctgggtttaagtaggggctgtagggggagggaagacggtgcagagaaacggaggcagagggtgggggtctggctttccagggtagacccgcctgcccagtctgatccgcagccccggcccctgccggcaacctcgggagacgggc

SEQ ID NO: 45214 - DNA, 1124 bp, Homo sapien
gcgccagaactccagagccctaagcgcctctgcgtacgtggcctctttgctgactttttggagaacagagggtatttattttaagagtcaaaaaagaggttctgaccaaccccacttagctaaatcctggcgctgggacccgtgagagcagctaaacgccagaggtcagacctcgctttttttggctaaaacgcttaatcaaacacacctaatacttctgccggggtgcggggaggttgagagcgcggcggccgctgccagcaatcgaggagccagcggcgcgtgtgctgagggcccagctagcaaaataaagagggttttcagcggagcggcggctcaggcgaggctgggggagccggggagcgcgtcccgccatttttccagccgaggtcagcagcgggtgaaggggcggagtccgtggtgttcccaactgcccaggcgggcggtgagatggggcaggcggttccgcaacgcggctcaggccccagcgccctgcctgcaggaggccgcttctttctctgttgccatcgggcgccggtttcctcttccggggatgcagggcagctgggggggctctgcctctgtgcggctcttccgtggttccacgctgggctccggggtgaccacagtcctcagcagcccacaccctcagcccgaagggggcccaggccccgtgcccagaggatccagagagacagccgggagcccagcagctgtggcagctgcccccaccaccaccccggggctggccaggtcccacctcctgacgccacacggtatgactgggccctcctggtcagtgcgtcgcatgtaacgccttcaactattggggccggtgttggagcatccgtctctgcgtccccacctgatgacaagctccggggagcaggagtgctggccaagcccacgcacggaccaagcccacgtcagactccgccagaaaggcaagaagggcctccgcatggcgtgacggatgggtttatgggggcattccatcccacccggacgctcggagggcagggagacaggaagatcaggcgaccaaaagtgcaagtgaaaatgcagctggccacagcaggaacggtgggcgcccagcagagagcagcgtggacagagggagggcg

SEQ ID NO: 45215 - DNA, 618 bp, Homo sapien
gccgggccgagggttgtatggaggcctgggattcgaactcaggactgtggcgcggggcctggctcctgtgggcgctacagaggtgcctcccgttagccccgcccccaccccaggagggcggagccaccgccaggcgcaggggacggtcctcctccgtccttcctgcgccccttcagcttcgccctggactcccgcgttccctctgtctcacaccctggtctctgcgccttcgttcactccgcagcccttgcgcccgcgcagcccagagctttggcgctggcccgcgctcgctctggtgcgctcgccctggtgccctatgcgtgccctcgccgtccctgcgcccgtcctggtgcgccctgggcgcgcgtcaccggcgcttcccaaaaagtcacattggctgtgggtcgggctgcgtcgcgcctttcctggccgcggtgcggggacctctgggaccgctccctccagcggactctctatttagtctctgtttacttagagggaaagcccgggggctcctggagagcaaacatctgcgggagataatctagcgagttgtccatccatcactccgggcgcgcagctccctggagagcccgccggagccggtaataaaaaggc

SEQ ID NO: 45216 - DNA, 993 bp, Homo sapien
gcagcatggacgctgggaagtgggacctggacgcttgatgttgaaaccgtggtgcctccaggatgccctgagcgccgtaggagagctccacttcccagccacgcgggcatccaggattgcatttaccggggctggaggcgccccgccacgcgggcatccaggattgcatttaccggggctggagccgccccgccacgcgggcatccaggattgcatttaccggggctggagccgccccgccacgcgggcatccaggattgcatttaccggggctggagccgccccgccacgcgggcatccaggattgcatttaccggggctggagccgcccctgccacgcgggcatccaggattgcatttaccggggctggagccgccccgccacgcgggcatccaggattgcatttaccggggctggagccgccccctgccacgcgggcatccaggattgcatttaccggggctggagctgcccctgccatgcgggcatcgaggattgcatttaccggggctggagccgccccctgccacgtgggcatccaggattgcatttaccggggctggaaccgccccgccacgcggacatccaggattgcatttaccggggctggagctgcccctgccatgcgggcatcgaggattgcatttaccggggctggagccgccccctgccacgtgggcatccaggattgcatttaccgggactgcagccgccccgccacgcgggcatccaggattgcatttaccggggctggagccgccccctgcatggagcctcgcacaccctcaggtttctcaccccggctggggcagctgcatggccgcatttcacagggagagtgtaaactgctgagttacaggcagagccctgggctcaggggtgggcggaggccctgaccaagcccagggccatgggggctacaaggaggcaaggcccctaaagtcaggcagggccagctagctgcccggccataggagtctgtccacacagcg

SEQ ID NO: 45217 - DNA, 1228 bp, Homo sapien
caatttgtgacgctctcgagccaggagccggcgcaggctgggtccgcagacgcccggttcccaccgcggccggcccggtctttgtcccgggaagtcgcctgaccccgccggccaggaacagtggcgttctcggcgcgtctggctgataaggcctttgtgacaccggggacaggctgtaaaaacgcagccagcttttgtctgcacctccgcgccgctggcaagggcggggccggcgagtgtggaaaagtttgcgcggattcccgttcacctctgacccccgaagcagttggaggcaggtcggggacccccgcccccgccccgccccgcctcgggccctgcgatcagcagtaatagcgattaattccgactgtggctccaagtcccatggccaaggcgccctcctcctgcaggtccagggccagggagggggagcccgcggcccggcgcgctagaccctcccgcggcggcggcggctccagggcagtgtccgcgccggaggggagggtcccccggcaagtctgctgccctcggagccggggtggggtcccaggagacaccgggggccctcggattgggggaagaggtgggggaaggggtttccttccgcagcgccgcggatcagaggagggaggcctggcgccctcggagctgcggtggggggcatcccaggagatctggctcggtgtgtagagaagggagtccgggcggcgtcctgggagtgtctgtggcctgcagagaggggatggggttggggtgtggatcccgggaggctcggaggcgctcggaggctctcggagggggccaggcggaggatccaggagggccgcccagcccccgtccgcccacccagccctctgcccgccagtggagcggagccgagaagcagggagtgcgggaggatgcccgaggtctcacgtcaggaccctcgacgggggtggggtggagagggaggtggtgggtggggtgggtggtgcggcctggagtggagccaaggggcgggcggccagggtccacattgccctctaacgggacccctcgagaagcctcagcctcgcccgctgaccctcctctctcctgcccagggcccgggccaggccacctgccccacgggcatcagccaggccgggcagtcactcagcagccccttccacttgcgcctgctacaatgccactcacggcaccgctcagagggtcacccgggctttgtcccagctggcgcttctcatcc

SEQ ID NO: 45218 - DNA, 1235 bp, Homo sapien
cggggccctccctcactttcacacgggttcccagcaggcggagcaaggaaaggccaggctcggagtccaggctcagccttgtgcacgagggcgagcgccttcctttccaggactcggtccttctctgtgaaatggggatgaccgcgactcaaccacaccaaaaaggtggccagagtgctttgcgccctcttggctgtctttggccgcctggcttccaagaatccagagggccgggcctttctacagcaaacatcggtccccgcagggctggtctccttccccgaaggcttcctggaggaggcagtggagcggggcctggaaggacagtgacgcaggagggagccgagccgctctggccccacgcctggcaggcgactcccgggccggcctcgagggggcgtgggcgcggggagggaaggcgcaggcaccgggcggcggcggctcggcgggaatcgagaggcgcgatccagtccgggcgatcacgtgggctccagccggcccaggtggggctgtgacctgtgacgcaggcggcgccgccacaggtgcccgggacgcgccccgccccctccccggccctccccgcccgggccctcggacccggagcagccccgcccgcccagcgcccacctgcggggccgcagccgccgccctccagccagaccgcgcaggaagcggaggaggcgccccgggccggaccgcgctgccgcaggagcgaagcggctgcaggacaggacaggacccggcgctggaagctgcaccgccagcgcgccgcccctccgtccctccgccccgcggcgcaggtgagcctgggggacaggtgagccgggggacaggtgagtcggggctcgggggagccgggtggggggattagcccgggggaggcgccgggaacccggggcgcttctcctccccctcgcttttcccgcaagccccgccccggcagccgcaacaacttcgcgaccctcctggggctccgccggggcgggagaggcggggctcgcgggctgagccggatgcgactttggacccgcccccccacacacaccaggcagccccctgcttgcccccgcccgctcgctcgctgccctctcttgaccccgagtggccgcttcctcttcctaaaggaaaacttccatgcaaccggaacctgggttcagacttgagcgccgaggactctggaagccccagggagtttgaaagagcatggggtggggggcggaacagaacgaccctcc

SEQ ID NO: 45219 - DNA, 975 bp, Homo sapien
cggagactcagctccgggggtctcaaagggcctttgtctccagcctgccttttcacttgacccgcagagtcgccagtgccatggggagcggggaaccctgctcccacagacaaagtcaggggatgtttttctttcctccggtcaagggacctggctgttagtagcctctgccgacagccctgagaggggacgggggtgaccgactcctcagcgcccacggaccctgtcccagaagcaggcgcgcctgccgggcactgccccgccctgctccctccagcctagcaggcagcgccctggcgcaaactttaaaaacaggaaacaaagggagcgcgccggggagcgccctggccccgcccgccctgcccaggctcgcccggcgcccacctggcctctggtcaccggcgctcacggggtagccggcctggcccaggtgacatgggtagcagcccctccagaggtagcggtagtgcgtgcccgcgacgcgcgccaggccccccaggagcccaaggcaccagagcgcggccagcccgcggtcccgggacgcccccatggcctggtaggccggcgggcgggagggggcgaggaccaaccgcgctgcgccctaagccggcggccgggcgacggggcaggcggctcgggctggttctgggttccgggcgggcgcgcaatcccagccccgggatccgctccgctcggcgccgcccgggagccgctctgggccgggcgcgccccgcccctcgcctttaagttctcagctttccctccgccccgcaggtaaaggccaagtccgcagacaaccgagggagccgcccccggccccgccccgagccccgccccacctcccccagggggccgcgccggcccgcccgccccgcgcattccagcgtgcgcgctcccggacccggacgcagatagggacctaggcacaaacgcagacatccacatgtgacccacagacacaggcacacagactca

SEQ ID NO: 45220 - DNA, 766 bp, Homo sapien
caaagctgcgctccaaaccgagagcaggtgttcctggtagacacccccatgccgtcagcatcccctccgcactgcagcatgtgctgacaacccacagccaccagacaacccacagccaccagacaacgcgcagccaccagacaacccacagccaccagacaacgcgcagccaccagacaacgcgcagccaccagacaacccacagccaccagacaacgcgcagccaccagacaacccgcagccaccagacaacgcacagccaccagacaacgcgcagccaccagacaacgcgcagccaccagacaacccacagccaccagacaacgcgcagccaccagacaacgcgcagccaccagacaacccacagccaccagacaacgcgcagccaccagacaacgcgcagccaccagacaacccacagccaccagacaacgcgcagccaccagacaacgcgcagccaccagacaacccacagccaccagacaacgcgcagccaccagacaacccgcagccaccagacaacgcacagccaccagacaacgcgcagccaccagacaacgcgcagccaccagacaacccacagccacagccaccagacaacccgcagccaccagacaacgcgcagccaccagacaacgcgcagccaccagacaacgcgcagccaccagacaacccgcagccaccagacaacgcgcagccaccagacaacgcgcagccaccagacaacgcgcagccaccagacaatgcacagccacctgcagcagcc

SEQ ID NO: 45221 - DNA, 837 bp, Homo sapien
cggggtccctggacgaccggccgagccctcccagctcctgctactcacatgccgggctgcagcgggagcaggggccgcggcggaacgctggcgcccacgggcacggcggggagcagcagcagcaccaacgccaggaccaccgcgcgccccgctgccctcgcctcttcaaggaacgacatcgtgcgcgccggtgcctcctccgctctccggctcacaggcggccccggcggctccccggagcctccgcctccacgtgcgccataggacgcagccacaggtgcccgcgcccgctccgcggagcccaaggtcgctgcaggtgcggagcgtcccggcttcccgcccgcgcccaaagtggcaccgcggagacctgatcgccgggtccaccctgcaggaactcgccccggcgcgttgagcacagtgccccggactcagagcctggaaagccgccacgcccccggcccgcccccagcccggaccccagtcccgacccgccctggctcgcccgccccctgcgccctcggccccgccccttccccctccccatctcctaccccaccagcgccccgcccccggcacggcccctgtacttgcccgtatccctcaccccagcccggctcctgcttccagccccgcccctagccccctcccctctccggtcccggccccgcccacagccttcccgagtcccgccccagaccccgcggggctggcgcagcccctttgcgctccctgctcgtctcatgcggaaagtccaagtcctaaccgactccagtgaccaatccaggaggggccgggcgccagggggccacaccccgcaaaggcagctctctgggatcc

SEQ ID NO: 45222 - DNA, 1622 bp, Homo sapien
cctccttcccgcagcctccaccagattgcgggtccgttcaccgcccccctccacacgcgctgggggcacctccgggagctggggctagcgcagggcacacacatgttccacctcgaactgcgagcgctgaccgggatctctgggcagccctctctgtgtgcactggcttgctgaaggctcgcgacagcctgggcccgggcgcgcattccagcactttctaccctccggcttcagagtgcattgctctgtggatccgtcacgaataagccgtgtgtgaagaacgccaggtcccggcagaagatcgctgcccggcgtgcgaactcccccacggtgcaccagggccgccgccctgcatcctccaacctcagctccccggcaccgcgaccctccgtgcagtgcgagcccccgatgggcgcgcgcccccacctgcgctccagaaggccgaagggggcatcccacttgcagggcgggtcacccgctttccccgcgggccaaggggctccaagattcccagcccctccttcccagccgctccgcgacaccctggcaaccggcttcggccccgccccttctcgttgtgtaaacaggaagtgagcctgcgcgtgacggtcgcttccggcccggcgaggggcgggagcgattgtgaacggcggcggggcagagccaatcgcggaaaacggcaggaggagagccaatcccgagggtcggcggacgcgggaaggggcggagccagaggcggggccggcaaggcggagccaatcgcggcggtccgcggggcggggccgggggcgcggccgggtggtggcggtggctgcggcgacggcggtcgcgtcggcgtcagggtcggggtcggtaaggggtgcggcaatgctgcaactgcgggactcggtggactcggccggtacgagccccacggcggtgctggcggccggcgaggaggtgggggcaggcggcggcccgggcggggggcggccgggggcggggacgccgctgcgccagacactctggcctctcagcatccacgaccccacgcgccgcgcccgcgtcaaggagtacttcgtgttccgggtgaggcaggggccagggccggggcgggggccgagggcgcggggcgggatgggggcgggtggggtcggaggcgggcgccgggcggtcccgcagggagcgagctgtgacctgtgatctttgcccccgtcccccaccccgcaacccgcccagcccggcagcatcgagcaggcagtggaggagatccgcgtggtggtgcggcccgtggaggacggcgagatccagggagtgtggctgcttaccgagtaagccggggctgcgctctccttggtggggggactcgccccgagccgccgcgcagcaccttgcgaggacttcccggggtgctcgtgccacgctcaggcgccccgtgccgcccctgctgcccttccaggcgggctggccttggctaagtcgagacagccgcgtccagtgtggactgaggcccctcctctgcctacagggtggatcactggaacaatgagaaggagcggctggtgctggtcacggagcagtccctgcttatctgtaaatacgacttcatcagtctccagtgccagcaggtggtgcggatagcg

SEQ ID NO: 45223 - DNA, 1323 bp, Homo sapien
cgtggggcaaaggtgccctcaggtggggagggcattgctacgaggaagagaagggctctgaaagcgcggcagtgttccgctgcaggcctaggggtgagccgcttttgatgactcactgaacctcgtctaatgggcgcaagcttgccttttcacgttaaaatgcaagaggcagggacgtctcccatgctccacagcaccctcacgtggggtggcgccttcgcaagtggactcagcggccccactaacccccgaaatggggtcgcgccttcggaaggggacccagcggccccgctgagccccggacatggggtcgcgccttcggaaggggacccagcggccccgctgagccccggacatggggtcgcgccttcggaaggggacccagcggccccgctgagccccggacatggggtcgcgccttcggaaggggacccagcggccccgctgagccccggacatggggtcgcgccttcggaaggggacccagcggccccgctgagccccggacatggggtcgcgccttcggaaggggacccagcggccccgctgagccccggacatggggtcgcgccttcggaaggggacccagcggccccgctgagccccggacatggggtcgcgccttcggaaggggacccagcggccccgctgagccccggacatggggtcgcgccttcggaaggggacccagcggccccgctgagccccggacatggggtcgcgccttcggaaggggacccagcggccccgctgagccccggacatggggtcgcgccttcggaaggggacccagcggccccgctgagccccggacatggggtcgcgccttcggaaggggacccagcggccccgctgagccccggacatggggtcgcgccttcggaaggggacccagcggccccgctgagccccggacatggggtcgcgccttcggaaggggacccagcggccccgctgagccccggacatggggtcgcgccttcggaaggggacccagcggccccgctgagccccggacatggggtcgcgccttcggaaggggatccagtggccccgctgagccccggacatggggtcgcgccttcagaaggggacctagtggccccgctaatcctcgaacgggtctggtccttgctcttgtgaatgagactgatggacggtgcccgcagctcacttcctggccagcacgtctggaattccggttttgtttcctcacttgcaaccattaaagttcgcatgcaaagctggagacacattttgacatcttggtcaagatgccccatgccttgaggttaccggtcctcatccaccacctggtcttaa

SEQ ID NO: 45224 - DNA, 680 bp, Homo sapien
cgcacctgcccgggcacctgccggggtcctgcacctgtccggcccccatatctgcttggggtacctgcctgggccccgcacctgcttggggtacctgcctgggccccgcacctgcttggggcacctccccgggccctccacctgtctagggtatcttcctgggtcccgcacctgtctggggcacttgctcagacactgcacctgccccgggtacctgcccgggccccgcacctgtccgggcaccgcacctgcaggatccccaagctgcctccacccacgcggccgcccccggccctgcccgccggggacgctggcaccgaggatgtcctgcccgtggcccaggtccccgccgctcaccaggtacttgccgtccggggagaacttgcagagtaagctggagagcttgaatacctcggagaagttcatggccgccgcctgccgcgggcgccaccctgcgcccgaaaacccgcgggacccctgggcgcgcagcaggctgcaacagccgacgccggcctccgaggccggaagtcagaaggcggaagtgaactgcagcctatcagcgccgccggcttccgcgcggcattgtggggcttgtagttcttgtgccgcagggctttaaaggaaacgcccacgtttcttccgaccagggatttccgacccgagaaccttacctcaaaggc

SEQ ID NO: 45225 - DNA, 2051 bp, Homo sapien
cgcctggcccttgcctcacgctccagtgccactgagatcaaggagagaacgaatttgccgctgactgggcagagcgagcgcgtggatcgcggccaccgcccgttcatcacccgcgcgcatctgggctggcaccgggcgaagaatcgtgcgggtctgggacctgggggcccagagggagcgagctcctgcgcgggcgctcggtccgcaggtttcgcaggctcaggggcgtgcctcgttctcacccccactccggaccccggtcctcttccctagacagcggccccctccacccctggctcccgcaggccgctagtagtccgcgccaggccccgccggcgcctctagggccccccagatcgcgcagaccctgacatccccgcctggccctgggttctgggagctgagagccggccagggtcctgctcgtacctccgggcgcccagcctcgggtctgctccccgcggacgccccaacctccccggccgaatggatggtggtgcgcgcgcgtcctactccggcggtgccggccttttctgttgccaaaactagacccaaacctctgcatgggattcgtctttgggtccccaccccgtgcgcccagcaaacagtgggtgagccatgaagatgtgcgagtcagccggaccctccccgtcaggcgcggacccgctgcggccagagaacccagtctgcgccagcccggctcgctcgcgaagccacgggcttcactgacgcgactttccaagacgtgggggtcaccatgggcagaggacatcggttcggagccagatcacgggccccataagcatcagaccataagcagcgccgccactgagagccgctcggaactcgcccagcatgtcgggtcccctagccagggcctggtgtacgtggtcgagggccctggaagccccgatggcctaggaggagcaggcgggcggggcggcgggtgtcgctggccggtagagagcttcggcctgacctagcgcaggtctggtgcgcgcagagaacaactccaagcgcaccgacgcccgcgagctccttccaaacaccgaacgggatccagagcccgagcccacaggcggcggccgggggagggagcagggtgctggccgccgcccgggagtgttcgcgtcctgggtgacccctggaaggacgtggggcccaaactccggctggggttgggagagcagcccccagaggctctccgcgggatcctctgccgggcgggaccgtggctccacaggagaagtgggtggcaagccctgcttggcggaaagcagccgttcccctcctcctgggcctggggcggcgcccctcacccctgttccccgcccctcacccctgttccccgccggccacatcccctgccccttggattccaagcgccccgcgcgccgaggagcccagcgctagtggcggcggccaggagagacccgggtgtcaggaaagatgggccgtctgggggacagcagggagtccgggggaaacgcaggcgtcgggcacagagtcggcaccggcgtccccagctctgccgaagatcgcggtcgggtctggcccgcgggaggggccctggcgccggacctgcttcggccctgcgtgggcggcctcgccgggctctgcaggagcgacgcgcgccaaaaggcggcgggaaggaggcggggcagagcgcgcccgggaccccgacttggacgcggccagctggagaggcggagcgccgggaggagaccttggccccgccgcgactcggtggcccgcgctgccttcccgcgcgccgggctaaaaaggcgctaacgcccgcggccgcctactccccgcggcgcctcccctccccgcgcccatataacccgcctaggggccgggcagcccgccctgcctccccgcccgcgcacccgcccggaggctcgcgcgcccgcgaaggggacgcagcgaaaccggggcccgcgccaggccagccgggacggacgccgatgcccggggctgcgacggctgcaggtaggaggcccagggccggggggcggttcggctccgcgggcgggggctggagcgcagcg

SEQ ID NO: 45226 - DNA, 1196 bp, Homo sapien
cgtagtgtcatcaggcggcctgtccacgtactttggaaacgtttgcagggcagagaatcctaaaatagcccgcagcccgctgggatgactcctgaaacaccagcgttggcactgacatttacatgagaatgggcgtccgcaggccgtgctgcctgcccgaggacaggtgttccaggatgcggtccctccgcacgcgcacgggcagctcgcaggccctgcagtaaagggtctccaccacagacgtgtccccagagtcactgtgctcaatcaggtgcttcaccaccaggtcggtgaactccgccgcgtagtcgtgtaaagccttctttttcccgcccattgtcgggtccgggatggaaacggaagcagcctcgacccccgaccgagggacccgtgggatctgcgctcaccgccctgcgagcagaggcgttcgtgtcggagcccccacacctggggagcggggagctgcggtccctggttgtcccacaggagaagggggagggaacggggcaggcggggaggatgagcgcttccgcgtgcagcgggggctggagtgggtccgtccgagctggagtggtctccgaggggcggcggatgctcggagggggcggatcccttagggctgggggccaggacgatcccacccggagaagcctcgcgggcgagaagagggtcccttcctgcgggggcagatggaggcgcgggagccttccccgggaggtgaccgaggccagtcagcggccccggggacccaaggccggggactctcggcggccggtggacgggcagggccggcccgcctgggcaggcggcggggtgaaggtgtccagggcctgaggcggcaaagtgccgccgccgtcagccccgactgccacccaccaggcacccggcccatccccggctcccatctagggatccacacccgggcgccgcggcgccgcggtttaaagcctgtgagatcccgcaacaacccggatccggaagcgcggggtcgcggctgggcgagggcaggggtggggccttcggtgcagacccagggccaagtcgagggaggctccgggcgcggggcggggtcttgggcgtgggggcggagcctgcgcggggcgtagagatctgacgggtcccagatgcacctgcacccaggtgctgactgccccaccttaggcggtttctctgggcccgttatctccaagtggagc

SEQ ID NO: 45227 - DNA, 1238 bp, Homo sapien
cggcccccctgcacctcctggccccggggctgggcggcctagagccccggccccttccggacgaggcgtctcccggccccactcgccccgcccccagccccttctggaccaggcgcctccccgctgcggccctagcccttccccgcatggccccgcccccctctcgccccgccccctctcgccccgcccccggccccttctggaccaggcgcctccccgctactggccccagaccttccccgcatggccccgcccaccactctagccccgccaccttccggaccagacacctccccgctgctggctccagcccttccccgcgtggccccgcccccgccctcgccccctgcccaggcccggcccctgcggagcccagagacgcggggacacaggtgaggcgcgcggggtccgggctgcggcttcccggtgcggccgcagtgggcaggtgcgactgtgcgcggcctcgctggctgagaactggcgggggtgggggcgtgccctggactgacccccaccggcctaacccgcggtgcggggccagggccggaactgcccgcccggctccttgcccggctccttgtggctgctggggacccccgacaccagccactttcccttcccggcccttagcaagatcggcttctccggtcacctttatttttttaggctcgaggcgtctgccgcacctcagcccacgacctgccccgctgggaggtgcgggccgctggccaggccctgaccgcaacctggcccagaggccccagccctcaggcaaggttctccgggtaagtgtggggccctgaggcgctgtggggtgaagaggtctatggaggggcgcctgtgtacctagggccttcctgcactcacaagcccccaggaggtgccaggatccgggagcctcccagggcctggaggggagtccctgatgggttcctgccgccacacctgtgaccatcacatgagtgtggagagacgtttactgagcaagtgagggaggccagcctcaagggccggctctggtggctgtgcaccggggtgacttgggaacaacgtgttctacgtcagcaagacaggaacccatgatcccagagttgaacacactgggcttgacccctcccaccgggaggcccatggtgggctgctgctgtggacttggagcctcagcactcccgagactaatgctgcgtggatgtcgggttgcaaggcggctgctgcagctccagcagctccagccatca

SEQ ID NO: 45228 - DNA, 1074 bp, Homo sapien
cgtgtaaaagtccagttaacagaatgcgggggagttcagaggccacctagtatgttggtgtggccaggagaagggggagttggaaggcggcatctgcttcccaggggtgatgccccccgcagctggctcctttcagccttgtaggaattccctgggcccagtgccccagggggcgtcactaggaactgctcggccccgagaggggttccttctccagggctactccaaggccccatcccgccccgcccgggcagcccccgctgaccttgagcgaggccaggtgggcgatgtcggggctgagttctcggaggcagttgtcagcagccgccagttcactgagcaggggcagcgcgccggggcgaaagagctcggcgggaaaggagtctaggcaattgccggtgaggttgaggctctgcaggcgcggggcgcagcgcgccaggtcggctggcagctcgcgcagccggttgccgctgaggttgaggctctgcagctgcggaaggcccggcggctcggcggggcccaggccttggcccggcggcagcgcctccagcgcgttgcccgacaggtcgagcacccgaagggcaggcagcggcccgagctcggggctcaggccgggccccagcgcgttgcgccgcagcacgaggctgtgcagctgcggcaggccctgcgccaggccaggccccggcgcgcgcaagctcccgcagccgctcacttccaagtagtgcagcagcggcagggtgaaaagccgcggcggcagctgcccacccgccgcccgcactcgctcctccagcccgggccccgtcagcagcagctcccgccgccgctcgcgctcagccagctccagctccggccaagactctgacaccgctgccgccgccatggcgcctcagctgctggcaggcacccacccaccagggtgcttccggggcagcgcgcgccacttccgacctgtgccggaaaagcccatagagaagccacctggctgctagagtgccgccgcgcgtgccatagaggagagtggcctctcctgcgtagagccggggaggggctggagagcggctcgctctctccgcg

SEQ ID NO: 45229 - DNA, 1265 bp, Homo sapien
cggatctgaaaacaatattccacgctaaatgggccgtcccggccggggcaggcggtcccagcacccgtgctgagctccccggcatacggcacgacggggccgcgccggctcttcggcgacagcaaggccggcatctaactccacaccgtccgcgcttgcaccgcgcacccaggcttcgtacccagctcccaggtggggaccgcgcccccgcggcgcccgcgccccgcgccccgcgccccgctccccactccggccctgggccggcgccgcagcggcccggaaggtacctgcttagagggaagggccccgactggcgctgccgcggccccggtggagagggcggctgggtcggagcggtgccgcggcccggggaggcggccaggcggcgcctcagcacccggaccccaggggcgtgcgggacccggctctcgtggacttcctcggcagccgccgcttcctcagacggaactcggggggcgccccttccgccgccccaggccgccttgcaccccaagctgctgcggcagtgacagggaagaagcagacccggccacctctgcccatagccccggccgcagcctccactctcatgacaaccaagcccagccctgggccagggcctctgcgcgtgcgcgaccccgccccaccccaggccgcgcctgcgcacaaggggagggctccgctactctggccctcagggttgtgtagtttccggggccacggcacctgggcacaccaggtggcgtcgcgcctttgctttcctgagccttctgagtaaggtaatgtggtgtccgtggggcgacgcctgcgcacaagaccgcgtcgggcctcacttttcccaggccttctgggtaatgtagtttccgggatcggcacccggcctgtgccagcttgcagagctcaccaggtgcagacccctgcggccagggcgaggacggatctgagcagctgggcagcaggtgccaccgcctgtgggacccagagggcttgaggacatctgcaatgctccagaagcccaagagcgtgaagctgcgggccctgcgcagcccgaggaagttcggcgtggctggccggagctgccaggaggtgctgcgcaagggctgtctccgcttccaggtgcccgctgggctaggcggggacggcccgtcggggaggcgtgtggggagaataggaggtgccgcttttcctcttccaaaacggagggtgcaggcggcgcccggggcgggtagttttcgttcgcctcagccgctaggaccccgggcccc

SEQ ID NO: 45230 - DNA, 847 bp, Homo sapien
cgtgaactgtgagctccacttctcccgagggcgtggaccggagccccccttctcccgcgggcatggcctgggagctccccttctctcgggggtgtggcccagaggccccattctgcgggggtgggtaacctgggagcccccttctcccggggacgtgacctgtgagctccacttcttccgagggcgtggcccggagcccccttttcacaggggcgtgacctggcagccctccttctcccgggagcgtggcctggagccccccaactactgccgggggcgaggcccaagcggaggccgctcctaggccacaggcaccccgtgaccccgccccggttctccagacagcaggtgacccagagtccccgccctgcccggcgcagctgctgccgggacccagccctcaccttccggctcctcatgagtgtgagcaccgcagccaagcaccgcgcgccccggccaacgcgtcccggcggagcggcgacccggagtctgcagagcgcgccgcggcggcgtccgacgtcagcacagccaatcacagtgcagcaccctcgtcatgtgattccccccccccccccccccgtgttggctctttcgtaagcggcgggcgaaggtcacaggccttgggccagtggtgggacactggagcaggaagtcggcctgtggccggccatgttcatgagggcgcgtcccttggcacccctgtagccgctatgtttcccacgcccgtggcaggcctgagagattatgtttgcggggggtgctttttttgtagcttctgtgttcgccatatttgaaaggggcagacggccatgttcgtgaacggcgcttcccttggtgcacctgtggc

SEQ ID NO: 45231 - DNA, 773 bp, Homo sapien
cttctcttggtgcgcctgtggccgctatgtttgagaggggcaggcaaccatgttcgtgaggggcgcttcccttgaagcctctttggcgccatgtatgagaggggcggacggccatgtttgtgaggggctcttcctttggtgcgcctgtggccgccatgtttgagaggggcgggcgggacgtccgtgaggggcccctccccttgcatcccctggctaacagcctgcaggagggcgggaagtgctttctccagtgccgcagagcgctggtttctgagtgccggttagcggccttgagcagcgcgagggactcccaggcctgcccgtgctgcggtcccgctggggagctttgcgcgcttgtcgcaggctgtgctgccccgcgacatgccgctttgggttggggtggcccgcccgggaagtggcctcagctgtcccccacgttgcgggcgggagggggccttagtggaggccgtcggtgggcccaggaggccagggtccggcgtcgggctgggggccggttttcgtcccccgttacgtgcaaggcgggaaatgacccctccgccgtcccgttactctccggggccaacgtggactcgcaggggccacgccttttccaatggccacgcccctagcaggcctgggtggacccgcagcggccacgcctcctccaatggccgcgccctatcaggtctggatggacacacggcggccacgcctcctccagcaaacacgcccctagcaggcctgggctgctgtgatgcgtcctctttggccgc

SEQ ID NO: 45232 - DNA, 2292 bp, Homo sapien
cggtggagagtccgggaggcccagattccctggaactttccagtgactcctccggagcaagggcctggccaggcagcagctgcgctgggcgatgagggaccgttgggtaattgggggcataggaccgggcttcgctgggttcggggcagaagcgccgaagctccgacccggaacgcggtgacttcatcaacgcagaagcccgcgcagccgagcagaggagtccctcgtaggcgaccctcggacagacgctcctgcgcggcccgcgtggctcagctccgccccaggaaacttttcgcgcagcccccgctccatgcgcccccacccagtccttcttcggggccgccccctccccaaagtagctctccgggtccactgggcgcccccgtaaccgggtcggaacctcgaacggcttcgcgtgccatccggttaccctggcaacaccatccggcggcgcccggcggtccaatcctagcctgcggcctctctcgagcctttcgcaaggtggggaccgggacgcgaccggggatggggaagggggctgcaggaggccccgcctgcgctgtcgcccctgctgggcacagcgccccccaccacccgcggcgaccccggcccccgcaaggtggggcggcgagcaggagccggggccaggccaggggctcgagctcccgttcgaggggcggggaaggcgggtgacgtgagccgggccgggcgggcggagttgggaccggctccgggaggcgggggcgagcgcgcggagaggcagacgcgaggagggaggcggctgagcagcgcgggcggctctgcggcgggcgcggtgggcgcgggcggcggggccccgggatccccgcgcgcctcctccgcgcggcgccgccgccgcgcgtccccacgccccgcgctccacggcgccctcgccccgcgcgcctctcgtgcccgcctcctgccagtctccgggccgcggccgtctgcagagcgagcgctcagacggagcccccgggcaacttgagtggcgccgatcggcggcggagcctctggcagagccccccgacccggcagcgcggaggggactcgcgtccgtccgcgtcgcgtcaccccaaaccctaagcagcgccgccccatcggcgcggagctccggctggaggcaagagccgcgcgccgggagacacgcaccgtgagcggcagcgccgccggcctccctcctcgccgccccggagggcgaagccgcggctccccagccctttgctgcgccgcgacagcgccggaacacgccccgcctcgctgccgccttcgctgtgccgccggcggagggggccgcgagccccgcgccccggccggaggatgtgcgcccccgcgggccgcccagcctgagccatgcgccccaacggcggcggcgcgccggccggcatggagccccgcgcggccgcgctctgactcgctgtgcgccccgcggccggcgggcggcgggaggcggcggaccgagagccggagaccggcgccgcgggacggaagcgagcgggcgcgggcgccgcgcagatggcctgggcgagccaggtctgaggccccgctccccgaaacgtgaccatgtggattcaacagcttttaggactcaggtgagcgacccggccggcgccgggtgcgtgtgggcgcgtgggtgccaggctgggcggaagcggcgctttcctctatgttgcaaatcaagggacccctcttcgcttcccgcaagcgggcaacggggtgcaccggtagccggaaaggggcgcccgcccggagcctggagcagcaccgcggccctggcggggagcggccgggtctccagggttccgcgcgtccggggtcggggcagcggcgcccgccccagcaacccgggaagtggggccggccaggcgcgcccgcagctctaggagccagcagcgcagtgtcctggccggctgccccggcgcgcctcctccccggggcccggggcgaggcgccggccgctgggcgcggcgggcgcgggggccggggctgccggggaaagctaaagctccgggctcccagcgagagcttcgcaggcggagttggaggaaaccacagccaaacagccactccgctcccccttctcctttctcggggccccggggctgagcaggggcctcccaggctcccagctgccgacccagctgtttgcgggtgacctccgggcccgacgggcgctcacagctggcgggcagctggggcgggagagctggggttcttggggagctccggcggccaccccgctgtaaacacacacgcacatacgcccgccggcgcgcc

SEQ ID NO: 45233 - DNA, 991 bp, Homo sapien
cgtgaaatggactattcggcgaccggccggctctgtgcctggcaggcgcctcagccccgcggtgccgggaagcagctccccgcaccctcgcagcgcgcgctgttcttgcacgtgagtgagcctttgaaggaaaggaaggaagggtttcggattcccttttgaagttaggaggagctctttccagaagaagagagcgtccttgtcacagcgcggggtggagagagagggccccggggcccagtccccctcctgggcttccactgaccgctcttctctcctttcccccccgcacagctccatgtccatccgctggccgggccgccccctcggaagccatgcctggatactgatagccatgtttcagctcgccgtggacctgcccgcctgtgaggccctgggcccggggccggagttctggctcctgccgcggtcgccgccccggccgccccggctgtggagttttaggagtggacagccagcgcgggtcccggccccggtgtggagcccccggccgccccgagtggagcggatccacgggcagatgcagatgcctcgagccagacgggcccacaggccccgggaccaggcggccgccctcgtgcccaaggcaggactggccaagcccccagctgctgccaaatccagcccttccctcgcctcttcgtcctcgtcctcgtcctccgcggtggccggtggggccccggagcagcaggccctcctgaggaggggcaagaggcacctgcagggggacggtctcagcagcttcgactccagaggcagccggcccaccacagagactgagttcatcgcctgggggcccacgggggacgaggaggccctggagtccaacacatttccgggcgtttacggccccaccacggtctccatcctacaaacacggaagacaactgtggccgccaccaccaccaccaccaccacggccacccccatgacgctgcagactaaggggttcaccgagtccttggatccc

SEQ ID NO: 45234 - DNA, 2304 bp, Homo sapien
cgggaggcgctgcccaccatcaacagaaatactcctccttttgccaactacacacgcgagaggctggatttccttcacagacgtccaccaaagccacacatcgcgacacacggaggcagaaagcagcggtctcctaagaagttagacacgaggaatctcgggcagcgaggtgcctgcaagcccgggggcgggcgggagcagcctgcacgcgtggggaagggcacgcgggagcgggtggcgccttccgggccgggtcggccgggaggttccaaggcaggaaaggggcgcagaaggccgggacggcgccgggtacaaagcctcgcagggacgcccgaaggccgcagagccaccgcggggaactgacagccggagccggagctggagccggggggcggggaggaggggcggaggggcgcggccaggcggggtccgcggactccggcctgggaaggatgcgcgcggactagggcgcggggagccaaggcccagaacatcggtaccgcgctcccttcagccgaggggctgcagagaggccagggggcagggggcagggggcagggggcagggggcaaagggcaagggcagaaaggaacccacgtagccaaacggcacccagcggccccgaccccaagtgtcccgacgaggggggacgcctgcgactaacgcggggacagcccccgccgcgcgccaccgccgcaccccaggcaccgggcccccacgcagggacggcgtggaccaccctacccccgaaccccgaggctctggccaacactgaggccccctgtgcctcgaggccgcgtccaacctcccccgcggcgccggcccacatggttccgcccgccgcgggccgcgttacctaggagaccgacccgccgcggccgcgccggaggccacggagcccacgcttttcagagagtctccactcgacggacccagaggcccggcggccggtgctcaacggagccacaagcctgaggaccgaggactggccgaggggcgcgccccgtccgctgccacccgcgggaggagcctcggaaggcggcgcaccgcgccgcacactcagtccaagaacccgcctcgcgtcactgtcgccgtcagggccgcggagccaatcagagcccaagtcgagggctgcgctttgcgagcgccagccaatcggtgcggcggcgggcccatcctgatttgcatgtccgacgacccctcaaccaatggtaatgtgactggcgtgaacaatagccaatcagaagctggaagaggcgtggccccgggcgtcccacgaggtgaagatgctgctggcggaacctgcaggagctagcgggattcgggggcgctaaagtcgcaggggcagggcgggaaggaagatccggcgcggggcacaggatccggagctggagcccccaggtgagtaccggggagaccccggcggggcgcgctttccaccaagctgctccgggacggcggcggcgggtatccgcgaggcccgcgctgcggcaggcgccgcggtcccgtctccatctcttcttccccggccctgcgtccctgcctccgccgctgtctcacctcctctccagcctcctcacctccttctccatcgtctcccttcccccatccctttctgtctttccttccctgtcctcccgcccgcccgacccttcagctcgcatccctgacccctgcccctgccgccgtccctcttcccggtgcacctcttccccatctctgcccgctccggtcctagcagcctcgccctcccctttcctccatcctcctctcatcccctctcccggcctctgcgcagccccaccggggcgctgctgttcccggtcctccccatctctcctcctgatcgcttctcaaggctcatccgtcgttctcgctgcctgtccctgtgtcgctccggtccctttccccaccctcccattctgcccccagcccctccgacctctccccgcgggcacgctctcaccaccttaccctgctccccaagactgtgaccctgcttcctgcaccagttcctcgggctgtttacagcacacacaccgccacttctgaccctgagcccctactcctatcttaagcttctccctcctgccaggccttggcacaaagcacttccgcacctccctacctgctgctgctcccaggatgcaaagaccccactgctgcaccgcgtcctgcggcattagcagcagccggggtacctgcccaccttcccaccccgccaaccagccgcatcctggtgtccctcctcctggcatttgtcctgggggctcttacagggactgtgctttgcccgcagcatcc

SEQ ID NO: 45235 - DNA, 1617 bp, Homo sapien
ccactgcactccagccggggcgacagagcgagactccatttcaagaaaaaaaaaaaaagaaaattgtgggccgtcctggaacgttggcggtccaggtgcagggccgagatgcaggccctgaggaaggggcgggagggtgcagctgggtagggactgaaaccagaccccggggacagggctctgtgcaacggggtggcagatcagcttgcacttcagagagtggggaagctggactggagccgggatgacgccacggagcaggcggctgatgtgtgcaagggcagtggccggcccatgtggctgtactgccctcagcgctgcctccgtcccttccctcactgttgtgtctctagtcctgagcccgcgggtggagcgacagggccgccctgcagaggccggagcacgtggttggagggcggagcacacgctggagtgcggggcacagcagggagggcggggctgcggctggagggcggggtcacagcttggagggctggctgcggcgggagggcggggtcacagtggaaggcgtggacacagtggggggcggggctgcggatggagggcggggctgcggatggagggcgggccggggaccttaccacgccgtcctcctcgcgcaccacgtactgcgccaccttgaaggagctcaggtactcgttcatgttctgtagctccgtgtcatctgtagcgtcctggttccggtccagcagcttggagatggccgcatcgtcatagtggatcacactgctgtcctccacgtccttgttgtcacctggggagcaggcaaatgcagtgtgaggacaaagactgccctggtccagccccggggtcccaggaacagactcccaacaatggcccttcccatccccagcaggggctgcagctgagaggcatggtgaccagacagaggaaactgcgctgtaacagccccactcgccgcccacctggcagtcccaggacgcccaagtgagggcaggtcagggaacccctcctctgcaggagcagccacctggtcggaggaggagctgaggctgggctgggttggcccctacctggcggggtgctaccgtgcttcttctttgcactggcggccaagttcccccctttggaggactggacatcagggatgggtgtgaccggcctctggccctgagacatcatgcctgtcagacagagaaggaaagcactggtgcaggaccacagagggctgcagggttggcgggcagtgcccagagacaccaccctgggctgtcctagccaggagatacaggtggggggtgcagaagagaggctgtgtgttggagcgggcagggacccaagcaagccctggatgggtgtctcagccgggccaccccagtcccctgccacgctccctcggaacagaggcccaccctccacgtcgtccttgaagagttcctccgtgccgaacttgaggatgtcgtccagctcctgcttggtcatggaccccgacttggagccgaggccgggccgcaccaccaggtgggtgagcatcatcttgcgcttggccacctgcgtgatgcgctcctccaccgaggcccgagtcacgaagcggtagatcatcaccttcttgttctggccgatgcggtgggcgcg

SEQ ID NO: 45236 - DNA, 2371 bp, Homo sapien
gcttcctccaacaggagctggaggtgtccatttgtggagtcttctcacccctggaagtcagaaggggccagatgcacgttcctgggcccgggagggcctccagcctcccacaagtctctccgaagtccagagaggccacagacttggcgcagggaagccgagaagtaagagtctcccagaaaggagggagggtggctgacagggtggggccctacccagctgtgccaggagggaaaacgtcccaaacaaatggtgagcagttaactaaagaactgtcccgcaaggcaacccctggcgcacagccctgtgtatactaaattctgagagagataaaaggagagagatggtaggggcaggggcggtggccctggggcgtcaggcccgtagccaaggcagggtgggctgggaacggccaccaccctgggcgatggtgaggctggagacagcggcgggcgctaggtcgcgccagaaggacgccggcggcccgggtaaagtgcttgggagcggcggtcacagcgcacagaggccaggaaagaggagcaggggtccgagcccgtgcgtcccagagcggagtcctcctgggccgggagggaagccgccccatcctgggcgctcaacgcgtccccaagcaccgccggtcctcgcccctctctgggccccacccagcccgccccgcggccgacatgggccaggggccgggtcccgcctgcccgcagcgaggccagaggcgcacggcggcgggacgcgagcgcggggtgcgccgctccgggagctagcgcgattcccgcccccttcaagggcacgcgggctgaccctgacagcgccgcgccccccagcgcaggccccggcccgcggtcctctggcccgcctggcccgcgtcgccgcccggggggcccggatcgcaccccgcccttagccgccctcacgccggcccgggcgctcacccagccttcgcccttggccgcgcggcgccagcagggcgggagcgcagccccgcaacccgggtgcccctcctgcgaggcgccagcccggccgcgccgcccccgccgcccgcgctccgccctgggcccggcccgtctcggcgcccccgccgctctggccccaggcgcacccgcgccccgctcacctgacatctcgtcctcattctccatctcctcggcgaacagccgcggcagctcctcctcggtgcccactgggccccgcatgcccggcgcggggaggaggggaggtgggcgccccccctcccgccgggcgcggtgccagccttaacccgtgcgctgccggaccggcgcgcgcggcgggcgaggcggcctcggcgagaagatggcggccgcctgcccccccacccccccaaacctccacccccccgtctcgacccccctttctctcggccgccttagcctgctccccgcaaagcccgggcgctcctcccaccgcgccccgcagcccgagtcccgcagccggccgagggtggcggcggcagcgccagaggcacggcggcacggcgggggggcggcacacatgcccggattgtgacgtccagtctggttgctgtggcaaccccatcccatcgttccggcagcgcgactagttaacagcagagaacaagttgggggactagtcctgagccgccgggtgagggtggggaccggggggcgccccggcagggggagccgtcgaggcgtccgcgcgcccgcggacccgacggccgagcgggcagtcggggcttggcgagcccgggcgcagggggaggcgaggaaacaccgcccccgcgcaccccgggcagagccagccgccgccgctcgcctgcgaaggcgctgggccccgagcccccaagggcgcggaggcagggtcttcagggcagcgcgcggcccgctcccccactcggttcacaggcgccgggacccaccccgctcccggctccggcctcggcacgttcctaaccccctctccaaagaggattagaagaaaaatgtgttccacacttggggaaaagacgctctggagactgtgggtctgatttacagcagaaaaatccgcgcaggcgggctcccctcacctgcttccccgctcccaccgcccacgtgcccccttccaaaaagcccctccaggctgggtgcagctgaaacccatgcagacccctaggggtggtgcggatctgcgatgtctgtgcccaaaactcccgctcagaagcgacacctgtcgcagagcaggaaggagccgccgccaccagccctcggtcgttaaaggtgaagatggaggccaaagccctcgggagcaagactggaattttaaatgagcgcctccagtctccgcggcggcaagtcttaaagctaccttaagaacgcaaaagttccaggggctggccgac

SEQ ID NO: 45237 - DNA, 836 bp, Homo sapien
ccgcacagcccagtcccagcatagctaaaggagaatgcaatgagagccttctccctacaccactgcaacacccgtttgggtctgtacagtgcgccctgataaactaatttcctctggggacgctaaaaagctcctcaaacccaggcctcctctccgaaagcacgccgaccaagccgcccttccgcggattcgtccccgagtcttggccgtggacttccgaatgcgcggctccccagggtagcaggtcccgttcttcttccccgccctccacccaggtaatcaggcccccggccggggtccgaggaccagtggccggcccagaccgcagtctccaggctccagctccccgctagcccctagctggggccccgggcctccgagacctcccggatctccctcacgagcctcgggccgcggcctcctccgcctacaacgtgctgggatcggcaggggctctggcccgctccggccgacctgccagcccaccccagcaggacgctgcagggcgccgtccccagcgagcctgggtagatgccgggctcggcgaggcccacgtgcctcccctggagccgaggcctcacgcggagccatactaaccacaggagccatggcggcagcggagttagaaagggaggtgagcgaactacgcagacgcaaagagcccgcagcgcgcaaggcacgcagggtccaggccgcactaatcactttgccacgcccctcgtccgccaccttttctcttggttatgtacgataggggagcgattggtttttcctgaatgcaaaacgcgtcctctcccaggcctggagggtttctggggaaggaaggaggcccggcg

SEQ ID NO: 45238 - DNA, 1922 bp, Homo sapien
gagaaagctcactgatcacgtcgacctagcaagcgagcgcacgctggagaaaacgctgggatcaacacgcatctgccaggcccagacggcagagggggcactgctggaaaggccgggaacctcccctctcaacctcccacccaaacccatccctcttttgggaacttggcaggcaatgaggatagggccttaattaagtggacgcccagtatgtgtatttcacgtgcgttattccactggggcctcacccattatcaggacaccagttctattttaacccagcgctgaggctctgagaggtcagtaacatggccaagagctcacaaccagcgaaaggcagggctgggattacagggcgtctcactccgcctcccaagcgctggaaagtcggtggaggggcgtccgctgctctctggcgcccccaattggccgccgaggaaatgaggcggcgatgacctgttcagacccaaatgggatggaagagtggggattagcgggggtagggggtggggtttggactcttttttttttttaagacagtctggctctgtagcccaggctggagtgcagtggcgcgatctcggctcactgcaacctccgcctcccgggttcaagcagttctgcctcagcctcccgaagggcgccaccatgcctggctaatttttgcatttttagtagagacagggtttcgccatgttggccaggctggtctcgaactcctgacctcaagctatctgcccgcctcggcctcccagagtgccgagattacaggcgtgagccaccgcgcccggcctacccttgaagaccccgcagccaaggtcctccggccccgctctgcgcggcgctctggtcttggggctccggactctgtcatgccgggcaggggccagtccgatccttgcacccttgcctggcaccgtccctggagccttggcgtcctggcctctcctccccgcgggctggaggtggagtggccgggccggaaccagtgcgcaaagcagatggcgagcgcggaggtcggttcggccccgccgcgcctcaaggcagcagccaccctggggaaggtggatgccggaagaggcgtcgcctgcgggtcacccagaggacacccggcggggaattccgagggtgggagtgaggagaggtaggagaggccacggcagagggaggccccgcgcagagtgggaaccatcgcccggtgcgggcctgaacttccagggccggctactcctcggcagagcgaccgcgcggtgtctcagagcgcggcccggagccgcactaagagcgctggacggcgggagagaggctcggaggaccggtagctcccagcaaagcggcccagcgggtaggtacaaggccccgcccctcgccagtcctcactgcctgttctccctgcgccggggagctccaggccccagccctaacctgggccctagcggctccccactccatgacctctggacgcccagtcgggtccaggcgcgatagggagggcgcgggcgcccgggcagaggggccgcgggagctcaagcggggctccgtgcgtgccccagccgcccgcttgcgctgtcgctgcagatgtcgggagctatcttcgggcccctggagggcccgagctccctggatgccccgagcatccacccgctggtgtgcccgctgtgccacgtgcagtacgagcgcccgtgtcttctggactgtttccacgacttctgtgccggctgcctgcgtggccgcgcgaccgacggccgcctcacctgcccgctgtgccagtaagtgtcccaaagttccccaaaaccccccagaccccatcccccgggcccaaggttggctctgcccgagctgggacccaggtgccaggagagtaaggctccaacttcaggcagaacgactgggagatactgcacccggtccttagctctccc

SEQ ID NO: 45239 - DNA, 1194 bp, Homo sapien
ccaacttgactcacagcaacctctgcctcccgagttcaagtgattcttctgcctcggcctcccgaggagctgggactccaggcgcccgccaccatgcccagctaatttttgtatttttattagagacagggtttcgccatgttggccagctcctgacctcaggtgatccgcccgcctcggcctcccaaattgttgggattacaggcgtgagccaccgcgcccggcctcggtaaaatgttttataaaggcagtttctgccctctccccgcgtcccccacccccctccacggacctacttacccagcctctgagccgcagtgccctcctctgtaaagtgggtatatcagagcgccaagtgcctggattacaggaaagggctgcgtttagctgcgcacccggccacggctgggacaaacacgcgcagtgacacgcggcggctgcggttcccgcgctggccgcggtcgggctctggcgctcctgagcccgcgctcggcccgcaggacgtggagaccacgtacttctgcaacacgtgcggacagcccctatgcgcgcgctgccgcgacgagacgcaccgagcacgcatgttcgcgcgccacgacatcgtggccctgggtcagcgaagccgcgacgtgccccagaagtgcagtgagtgaggcttgcggggccggggacttgggggtgggggcggggcgggcactgaccggagccctcaccaccgcccgccgcccccgcagcgctgcacgcagagccctacctcttgttctccaccgacaagaagttgctgttgtgcatccgctgcttccgcgacatgcagaagtgcgtacaggggacgcgaggggagggggctgggggccgctggagcgggcctcacccgccgccttctgcagggagagccgggcacactgcgtggacctggaatcggcttacgtgcagggctgcgagcggctggagcaggcggtgctggtgagcgcaggggcctggcgcgcggggccgcgcggcggcgatcgcgagcctgaccacgccctgtccccaggccgtgaaggccctgcagacggccacgcgggaggccatcgcgctgctgcaggccatggtggaggaggtgcggcacagcgccgccgaggaggaggacgctatccacgccctcttcggcagcatgcaggtgaggggtgggggttgggggataaacgacccagc

SEQ ID NO: 45240 - DNA, 909 bp, Homo sapien
cgggcctgtgcgcccagccccacccacgtcactgcggggcctttgacctgagacagggcagcaggtaggtctctgcaccttaagttacataaaagcactcgcgggctcgctcactccaccccacgcgcacctgctgagctgcacaagctgcaatttaacaacccactcctcgggtgcagggcgcccgagcccggagagagagggtcccctcctgcgacctgaactcgcggatgaagagcgcgcgcgtgggaggccactgcgggcccggggagaaaggtgcccacgcgccgcgccaagcggaccgccgcccgccccgccggcccccgccggcccccgccggcctgcacctggtagcgaggcggccgatagagcagcagcagcagcgcgttgagcccggccacgtagagcgccagcccggtgcggccctgcaggccggcgcgcgtgagcagcggcagcgcgagcaccgaggcgcccagcaggaaggtggcgaggctgagacgcgcctcagagcccggcggagcccgcgccgcgcagcccgccatggcgccgggcggcggactagcgggcggcggcgccggctgtagcccggagaaacgcgccggctgcgcctgcgcactgtgccgccgatgccggcccgggaagggcagctgcccgcagctgcgcgccgcctgccagttctcgcgagaactccggcccgccctgttgctgtccggaatttggcgggagcgccccgcccgcccgcccctccccgcccctcggggacatccgggctctgagccagactctgtgccgggcgggggccgggaagtggtgggagaagtcgccgcccgcgtctgtccaaacttagtcccaaactcaggaggttcctgtcccaagaagcaatgtaaagtttgaaacgagccgagcgcg

SEQ ID NO: 45241 - DNA, 1229 bp, Homo sapien
cgaccctcggccagtgtaaggcgagtagcgggccaaggaggctgtttgtgatggaggagccacgggtgggggcgtcagaaagtagggggatcattccaggtggggagaccactgaccgaaaacgggccacaggacagggggcgcggcgggcagtgtcggggttggggtcggggggcaacggaggcggaagtccattcagtggaccagggcggagcgacgcctgagaattccgcccaggccttgaggcgggcctcgcctcccgcagccaaagcagaacattgcgaattagagcattttgcggtcaattttccactgcttaagaaacactaagctatccacgtgagcgtccccccgcccccggcccgatgcgcctggaatcccaggggacgggcttgggaggggtggtggccctgggaacggcgggtgtcggggttcgggcgggggcagcctcgtggcccctttatggcggcccggactcaggagagggggcgggcccggcacccagcggcgggccgcgagagctgcgcggagggccattggtttgctaatgccctcgagttgaaaggcgcgggcggcggtttatagggaaggattgtaattagaggacaaattgccccgctgccccgcagctcgagaacgcggggagggggaggcccgccggggcgcgacgcgcgccaggcctctgtgcagatgtgcagcagctggaagtccgcgcctggcggggcgcccggagtttggccccgagggggcgggggcgggcgcgggcgccgctttgtggggcccgcacaatgcccttaacactcggctgccccttttgtgcccggccgcgccgcccgcccgccccgcggtgcctttataccgcgccgccaccgccccaagctcggagcgagtcgcatggaggacgccccggcccggccggtcctggcgcttcaaagctgcccggcgcgtgccagcgcccgccgcctggtctcggcccccgccgccctcccaggcccgggtcggcccggatctggcccgcgggccctgcggtccgggctggacagagccccagagctgctgttgccgctgcctcggcctgaaagggggagggcgtggcgcgattctccacgctgcttggcgcctgggaacgccgctatcctgggaagggtaggcgggggcgggctggggggagatgccctggcttgatagagctggggggcgcaccccaccctgagtccctacacagaagc

SEQ ID NO: 45242 - DNA, 1461 bp, Homo sapien
ttctcgcgtccgctcttccccacagggctctggcctgtgcccaggggagccgagcaaccgtcgggcttccgcagctgcctgcccggcgtgagccagctccttcggcgcggagatgaggtcggcagcggcctgcgctgccccctggtgcccgagagcgccgccggcagcaccatggacagcgccgggttgggccaggaggcgcccgcgctgttccgcccttgcacccctgccgtctgggctcctgctccggccgccggcggcccgcggtccccaccacccctgctcctcctccccgaaagtctccctggctcgtccgccagcgtccccccgccgcagccagcgtcgagtcgctgcgccgagagtcccgggctgggcctgcgcgtgtggcggccctggggaagccccggggatgacctgaactgaaggcgctccctatttggtctcgcgacacagggactattttcagcacgcccacagtgactgccaggaccccccagtcgtccgttctggtcgtggggcgggggtggcttggagagggccgcgcaccccgcaagcgcagggaaatacccccagccctgccggactgggtctgcgcgtctgggcataatccacccccactctagctccacctacacacgccggaccgctcgctctccgcccatcctccggaggggctgggagggggtgtcctgggctgcgcccctttcccagggacccctggcgggcaacccgcccgcccccacccccgcccggttgccgcgcagcggtgggaatgtcgcagttggcaacagcgcagagctgacccctcgcagcgaggagaatcgctgccccgccccggaccattcagcggaccgcgggcgcccggttcccaccggcacaaagcgcgcctggccccgccccgccggcaaggggcccccagcctcccccaacccgggatcctcttgacttccaaggacctccttcgcaagcggtgctgcccaccgggctggcgcattccccgaggcccacccttctcagaagccccgcccctaagatgcaccgccccaaccggacgccccgcccacgcggttcctggaagggacccattgcttggtggcaccagcttgaaggctgcaaaagtgaacccggtgcctctcgtgggagaggggaacgccttccgctcgacaaagaccctggcccacattccaagcccggaccccgtagaccccgcagctccagatccctagggctgccggagaatccaatccctggacggctctcggagcgcgctgcgccactttattggtccataatgaggtcactgctgcgcacggacttcggtggtgggaggctctcaagtcagattttcttcccctgggcttctggcccaggagtccgggccagcgaggggcagcttgggttgtggggtcagagatcctggcaccctctcccgacaccttgtaattcagaataaagccagcg

SEQ ID NO: 45243 - DNA, 1380 bp, Homo sapien
gttatggtgcagtgtgggtggaaagcccctggggaggccaatggctccagctcagcctctccaaagcggggctttgtccgatcccgcagtggccctgtctcaggttccctgctcccgacgtcctgttgcgcagggctggtgatggcgcagctggacgtgtgcacatgtcactcactacccaagcccaagcttgggatgtcactcagctccccaggcccgacctcactcggcccgggacatgcggtgcccagcgcagtcgtccggggcagccgtcgcccctgggacaaggccagctgggaggagccggaagacaaacgctgaggccaacgccccctcacccctgggaggggtggcgcatgtctgcgcgcggggcggaggcgggcgtctttggtgctgcggccccggagagcggcctggcctgcctggcgtccgtggggaggcgccggcggtcctaggacgcggagcccagcgagtccgagtgcagcgtggcgtagcccgaggactcggagggggaactcaggaagctgctggtgctgccgccgccgcccgccgcgcgcagccccccgggctcgccccacgacgcgctcaggccggggcgcagagagccggcgtgcgagtgcgcagaggggcgtggccctgggctccgctgggcgctgcttgggggcgtcggggcctctccgggatctgcgccgtcgggggcggcgggcgcagcggggaagggcccgggcgggcggcgcagggcctgtggctcgcactcgaaggcggtcagggcgaaggcgtcgggcagcagcgaggccgaggcggagcgggggccgggcccggggcggcggcgcgggctgccggggggcgagtcgcgggctccccgcgggccgctatccagggccgagggccgcagcgacagcaggctctcggccgagcggcggcgcgcgcgggacggtggtgcgtcctccgcgaaggccaggaggctggcgcggcgccgctcgggcccggcaggcagcaccaggtgcgccagggcggccaggtcctcgccggagccccagcgcggcaggaaggcgggcagcgggacggcggcccacacgtccgcatcgtcgtgggagaagcgccgcgtgggcgggacctgtcaggacgcggctggcttttaccccgagctgccctcctgggaaacggggacaaacccttctccaccctggggaaaggccttccgtgggtcagggaccaggctgcgcgctggggcagtctggctgggagctgtgaggtttggtgcagtctcttcgagccgcagggctgtgtcagacagctggggtcggttggggagggcgctcgttgaggatactgagccggcaggagataactcatgtgacagggaccatgggggtggcg

SEQ ID NO: 45244 - DNA, 2002 bp, Homo sapien
cgcagcatctcaggacccggcttcccacttccccgcccactgcagggccaactgcaggtgcaactagcctgggacccacccgggccatgaggcctccctccgcaagacatgcgggcggggccggggcgtgacgtcacagctccgggccaatgaggccgcgcggccccgaggccccattgcgcaacaaagagaacccagaacttgaaaggattccccgggctctggctgcgccccggcttccgcccccacgccggtctccgcccgcgctgcagccgatgtgttccacggggcccggcctggccgtcgcccagggagggacgcgcagcgcgaggcctggacatctccggcacgccccccccagcccccgcccctacagtcccaaccccctggggctccgatccccccccccccccgcaatccccgctccgactcgcgtgctctcgcctgctggtccccagtgggtgccccgagtcctgccccaccccgagggcgcgtccgagcgacaggctgggaaacctggcgggactgcggcccccggacccctctgggttgcgccgagcaggggcgggctcaggatccccagaccgcgccccgcccccgtcccctgagaagcccagggggcggcgctgctaggccccgatgcagggggacggagggaggggctggccccagggaagttaccccgaaggtccccaagttgggggggtgccagcgctaagcgccgctcgtgggccctcggacggaccccgcgaccgatagggcgcggaaagccccctcccttcccgccgagtcctcccgccggggtcctcccgtccgtccgccctcgggccagggcggcgacgctcaccctgcattcgagcgcccggggctccggctcgctgctcccgcctccggctccggctgcggttcccgcgcccccgggccgagcgcaggccgccgagggccgcgggggtggctggcggcggagcggcccgcgggccggggcatgctggcggcggccaccggcggccggcgcgctccgctaggtgggctcggccccgccgcccctccctcccctaggcgccgccgccgccgccgcgcttcgctcagctcccgccgctccgctgctgcgccgggcggccgggggcggggggcggagcagggcgcatgtctccgccggggcctccgcaccgcccctcggcccgccccgcccccgcccgctcagaggcgcggccgtctgtcggtctgtcagcccgtccgtccttccgtcagtccgtccgtacgcagcccacccgtgtccccgcgtccgcccgcggccggcccgagcctccctgggctggtggcgcctcctgacagcgccgcgcccctggctcccagctcggctcggtgcacactccggacgccgccttcggacgccggggcaagacccaggcccggagctctgggggcccgggggccagagggagctggggcaggaatggacactgagaacctggggccagggctggggctcagggagaccttcctggaggaagccgcatctaagatgaacaatcggggcggggcgtggagaggacaagggacgcatggccagcggcttctaggaaccgggaatccagtctgaagcaggggcagcgaggggcaaggttgggccagttacggattcacgctgctccccgggcctggggggtccactgagggaataaagtgcacgggccaccgggctgccgagtggtccccgccacccccacaggctcagaaattgttctctctgaaactctgagcaccaccgcccagccgggagaggccagggtctgcagcccagcgcctgaagccttctcctactcccctcctcccctcctcccattcttcccgcccctccgcccctccctcccaagccctcatgctatcaccactcctcatagagcacaggctgtcacccacagactgacagcctcagctggccccatgcaggcggaaagcctcctgcttcttgatgggggccctggagaggacgcctcct

SEQ ID NO: 45245 - DNA, 858 bp, Homo sapien
cgggcagaggggctcctcacttcccagtaggggcggccgggcagaggcgcccctcacctcccggacggggcggctggccgggcggggcgctgacccccccgcctccctcccagatggggcggctggccgggcggggggctgacccccccacatccctcccggatggggcggctggccgggcagaggggctcctctcttcccagtaggggcggccgggcagaggcgcccctcacctcccggatgaggcggctggccgggcggggggctgtcccccccacatccttcccggacggggcggcgggccgggcggggggctgacccccccacctccctcccggacggggcggctgtccgggcagaggggctcctcacttcccagtaggggcggccgggcagaggcgcccctcacctcccggaaggggcggctggccgggcggggggctgacccccccacctccctcccagacggggcggctgacccccacctccctcccggacggggtggctgccgggtggagacgctcctcacttcccagacggggtggctgccgggcggaggggcttctcacttctcagacggggcggttgccaggcagagggtctcctcacttctcagacggggcggccgggcagagacgctcctcacatcccagacggggcggcagggcagaggcgctccccacatctcagatgatgggcggccgggcagagacgctcctcacttcctagatgggatggcggccgggcagagacgctcctcactttccagactgggcagccaggcagagaggctcctcacatcccagacgacgggcggccaggcagagacgctcctcacttcccagacggggtggtggc

SEQ ID NO: 45246 - DNA, 1376 bp, Homo sapien
cgcggctctgggcacctcccctccacctctgggggctttggttagcgcagcacaaccgccgaggtaatgatcccgaatcctcgaggaggctaagcaggaccacggggctgaggctccgggatgctcgggcgaggcccgaggcggggcggcccacgggcgccggtcgccgggctctggagctgtgcattgacctccgcccgccccgtccctgcctggctttctcgcccaaacggcccgtggcgcggccgccgccctggagatgcggccaggaggagccggctggaggcgggcgggggccgcccggcttgtgcggcatcgcgagtcgcatcccggccgggcgggcgtccggggcggcggcgcggaaggccgtgcggggaatcggcgggcgggggcggcctcggcgggtggggaccacagagccaagcggggcaggcctggggcggtgaccggcgcgcctggccgctgcaggctgcgcgcgggccctctcttaccggcagatctggatggcggacggcgtctcgacgtctgggcccgacatgctgggggctgcggcggcggatgcggcgggcggctgcagaagggcgcaggtgtctggcaggcccggcgcggaatgaatgagcccgggccgcgccataaagggggagggcagaggtggagcgatggggctggtgaggcggggcctgcgcgccgggggcaatcgaacgcggcctccccgcgccgaccccgcccccgcgccggccccaccccgagccccgcctcccaggccgccaaggctgcagagagctcgcgcgggcgtacgattctggcggcgtgggggcccaggcagccgccgcttccagaaggttcggtggcggttgggccgcgccggtgcggggaaggcccgctagccgcggcagccgcgcccgacccggtggcagccccgagggaagcgtctggggcggcctaagtggcggagcagggcggacttgggccctcactctccgcgcggcggtaaatatttgtgctgggcgttcccggccgcccgcgccgccgattcgctgccgcgcccagtgcctgggcggccggatgaggtcagagcggaaggcgcggcccgggctcctggcagtggggcctgattcccacccccgcccccaacccaccccggcaccagtcgcccgcatcgcggctctcgctaagatcggccctaagagagaatggaaggctgtttcctagaaaggagcattggtggcggctgctgggaagacacggggaatggaacgggcctttgcttccgcagcacaaagcgtcacgaggtggggaggaggaaaggccggcgactatctacaccgccgcctgcagcttttactgggagcgctgagcgccagcctggaggtgca

SEQ ID NO: 45247 - DNA, 1474 bp, Homo sapien
ttattccctgagccgagccccagccccagggctttcagtctgccacgccagtcacaaacagccggcttccggcctgggtgtgggtactgggctggcccctaatgatgggaacagcagccgccaccaagagcttcaacctgtccagtgccccaaggtcccaagcagtcggcagggtctgtggatcggccgaggggctaccacggccgccagaggccagggccgcagggaggcgagggcggcgagggcaccggagcggatgcgggctctggggcagacgcgggcgctggggcgggggcagacgggccactggaatccccagcgcgcccgccgtccagggtggcgctggccgctctccgccacaggtgctccagcaggcgcgcgctcacggcgggctccaggacacggcaggcgggcagcacgcgggccaggcgcgccacacaggcgctgtagccctcgcggtagctgtcgcaaggcactgcgggcggagagccgcgtgaggcgcggggtagggtgccgggtgcggggtgcagagcgcgcggcagggcagggagggctcactcacggggcgctgccgtgggccatgaggacgcaggcagctcctgcaggaagcgcacggtcatttccaggacgtctgccttctctagcttcgagcagttggagttctgcgcccggccacgaggaagagcgacagagaaccaccaagacagaactttggccggctaccgtgcgcaccctcgctctagtcgggagctgggtgtggggcgcgccgtggcctgctgggggtccgctccgacgcgcccaccccacccaggctccgcctcgggcgccgcgcggaaccccctggtgggttcctcccgcaggagcaccccgtccccctgcccccgctccgcgccccaggaccctctgccctccgcccgggcgcgctcacctcccggcccagcagcggcaggatgagccccttaagctggctcaggctctggttgatgcgcgcgcgccggcgcttctccagcagcggcttcaggctctgcggacgggcggcgcggtggttagacgggtccccggagtccccagccccgcccccagtccccggtacccaccttgcgcagctccgccgcgtcccctgcccggcgaggcagccccatgctccgcggggaagcggtggcagctgcgagccccacgcaaagggaaaccgaggtccgaaatgaggtcccgggcgcggcccgggctggtgccagacgagtgcgcgccccgcccgcggccgagctttaagggagcggctcgcccgccccgccccgccccgcggagtccggccgcccgctggtcccacctcctgcctttgttcctgcgcagggtggagccgggaggggagaccgcgacgcccccggggatcccgctccccgcctttgcgtcctgtctaccgcggggtggcggcccccagttttccccgagcacctgcgggagagtggtaaaggcg

SEQ ID NO: 45248 - DNA, 1548 bp, Homo sapien
gagtgaaaccttcagcccggggtggggccaagcccccacgggactccagagggggtgggtgttgggacaggaagggcacagggtgcttcaagatcgctgataggccgcctgcactcccacagccatgtagctcccaccttctgtcagcttttcctcgcgtcctttgggcactagccgctcccacggctggtgttcagtggagcctgcagggtggcttggcacacattcgctctcctgcccgcgccctctggcactttcctgagcccctgcaggggtctcagccccctctctctggatgccggcgctcccgcgtctccccacaagccctaacctcccacccatccctgccttctgtgtggctggaagcccctccacaccgacagcggctgcgggcggcctgaggccatggcgttcccagcgcactagtggttcccgtcctgccttcctgccctccccgctggaacctctgggggcagttctcggatctggagggaccctggaaggcagggctctttgcaatctccggggatttcgacccagagcccttcagggacgtggcagggctgctcctgcctcagggccgttgtcctcgtgctcctcaccccgcctggaatacccttctcgccgctcaaacccagccccacggcacctcctcagagacctttccctgtccgcccacgcggtcccgacaatcactccccatcacctctggaattgcgtcgccggcgcctggaaccgcagttagcgggcactgggcagatgaatgaatttgtctgtgcctggacggctctccaattcgaacccagttttgctgccctctggggtctcaactgttacgtgaggcaaattaggagagaagcccctgggcaccttgccccagtcgcacgagtgtccccgcgtcgcggcgggggcgggcggggaactcgggcggaggctgcggggcggggcggggcggggtgggggcgggcccgagtcttaagccggcgtccgcgggctccggccccagagcgcggcggagcggagcgccaggcagcgcggagcggaggccaggcccacagccgctccgcctcccggcccgcagatccccgacggccgcaccgcgggctcctctggcccgcaagaacacgtgcatggcgtcctggggaaggcgctgagtgcggagtcgcggcgccgcacgcggcaccatggccctggagcaggcgctgcaggcggcgcggcagggcgagctggacgtgctgaggtcgctgcacgccgcaggcctcctggggccctcgctgcgcgacccgctggacgcgctgcccgtgcaccacgcggcccgcgctgggaagctgcactgtctgcgcttcctggtggaggaagccgccctccccgccgcggcccgcgcccgcaacggcgccacaccggcccacgacgcctccgccaccggccacctcgcctgcctgcagtggctgctgtcgcagggcggctgcagagtgcaggtgggtccgcgcggttcgccaggggcactgaggcttcctcctcaggacagagtcctggcccagagtcccc

SEQ ID NO: 45249 - DNA, 698 bp, Homo sapien
gcgcagacccgcacgcgcgcgcccacgacggcatgaccccgctgcacgccgcggcgcagatgggccacagcccagtcatcgtgtggttggtgagctccgggcccgggcggggagcaggggaggcggggcggagccggcagggcggggagtggagggagcggggccatcaggggtggggcgggggggcgggggcgggccacggaggtacagggggcgggcctacaggggcctggcgcccagcccccgcccccctctccccgcccgtcccgcccaggtgagctgcaccgacgtgagcctgtccgagcaggacaaagacggcgccaccgccatgcacttcgcggcgagccgcggccacaccaaggtgctcagctggctgctgctgcacggcggggagatctcggctgacctgtggggcgggaccccgctgcacgacgccgccgagaacggggagctagaggtcagcgcgggcccggggtgggggcgcgcgccctctgctggcaccgcgctttcagcacggccctgcccgggcgcgggggtcccagctcgcggccgcggccgggtcctcactgcgtgcccccgcagtgctgccagatcctggtagtgaacggcgcggagctggacgtccgcgaccgcgacgggtacacggccgccgacctgtcggacttcaacggccacagccactgcacccgctacctgcg

SEQ ID NO: 45250 - DNA, 2140 bp, Homo sapien
cggctgtgtgcgtccctccgggctgtgtgcgcccctcccggctgtgtgcgcccctccccactgtgtgcgcccctcccggctatgtgcgtccatctcggccgtgtgcgtgctgggccgcaggcgccagggccggggcccggacgctccacaaagggctctttgtgtcgccgcggcgccccccgcgcgggtgcctgaccgggggcgggagcagggtcgtggcgtccgaacctccgggctgcagggggcgcggagcgggcgggctggcccagaaaacaaatcctgcggtgtcgcatttcctgcaacgtgagccaggtcgggcggggtgaagggtctgaggccaccgcagggacgcatgggctggagagtggggcagaggacagcccccacccggtcactcagtctttggcccggccgcctcactctccctcactgagctgggcctagttgggggcagctgcgatggggtgggaagccacgctgtcacccgaccccgccttacggcccctgaaatccgaggcttgagcgcgggtgtcggtgtcgctttcgtggatggcgatggtttccagatgcaggaggggaagggtggggacgcgacccggagccgggggccaaatatgagaggcctcctctgcccacagtcagccctctcccctctcgggcggggatgaaggtgggggctcagctcccagcttagggagaggcgcagggggcggggtcacatctggccggggacgggtgcagagccgcggccaggtgtggcaaagtagttggcgccccctgtggcatccgcgacggctgggggggttcagcctgggattggcgggccccgggtgatgtcaggccgtcggagcccataggctggctgtgcgcgggtggctgtaacctgagaggaagtatcaggtaacgcaggtgtcgggtcctgccgcccccacagccaggtgcacagcgggggccaccagcaccgtggcaggtaggagcagcccccggacgggcaaccggggtccgtggcaagccggagcctccgagagcacaggctctggagggggctccctccggccccggacccccgaaagacagggctccgcggagccctggggacccgcagtccttctgacagccgagagcggagtgcggccgagggcctagtgagggctaagctgggaggtgccccttcgccagctccccctggcgtcggggctgggccaccccgcccctgggcccgcctcttctggcctcagtgggggcccctgtgccccttggccggtgcccagaacccctccctgtaaggcgggcggagcctgcccttccaccgaggcccccatgaccctcgcccgctgcccactgtgagaaccagggggtctaggaagtcagctgctgcacccctcgacggccgctggccgcgagtccccaggaggtgaagagctgggtggggaggcgtggggggcgcctaccgggcaggtgcccgagccccaccggtcactgtcttcccgcagctgagctcctgtgacggccacgacgggctgcggaggcaggactccagccgcaagccccgcgccttcagcaagcagcccagcacgggggactactaccggcagctgggccgctgccccggcgagacgctggccgcacgcccgggcatggcgcacagcgaggaggtgcgtgcccgccagcccgcgcgcgccggctgcccgcgcctcggccctgccgcccgcggctcactcgaaggcccctccgctcccccgcaggcggcgctgcttcctgggaaccatgttcctaacggctgcgccgcggaccccaaggcgtccagggagctgccaccgccgcccccaccgccgccgccgcccctgccggaggccgcgagttcgccaccgccggccccgcctctgcccctcgagagcgctggccctggctgcgggcagcgccgctcctcctcgtccaccggcagtgagtaggggcaggttgaggggcgtggggcggcgctagccctgaaaggggagggaaatctagacaccgccccctccccagctgtcactgcccgggtccttcctcttctacatggtcttccggccacccctaccccattgagtacttgaccctaagagagggctctgggttgcttgaggtcctgccaaagcacgac

SEQ ID NO: 45251 - DNA, 2649 bp, Homo sapien
gagtggcctctgattctgcacagaaaacattgagcacagggagcgggaaggcttgggccacaggggagctggagaaggggtcatgagtctgggaggagaggcctcaatagccgccctcggatgggttggggagggccaccgcgcctctcagcttcaacgcctttcgcaagttccttgggtggtgtaatgagcgaacaagccaggcatggagaccccgtctgctggcctgttcttgccgccgcagcagcgaccagcgaccggccgtgccccacgccaccgaccaaagtggacactgcccagagcctggagcggcggctcaggccgaagcctcaccccagcgtcaccccccgccggccagacgcggtccctccctgcagacgcagccccgcggagccattacaccacccgggacatgcaaaaggctcccggcgccacggcgggagctaggccagagggagacgcgcctccctcccctctcttgtcttccccgccttagctgacggccgccagctcgtgctgctacccccgcgagggctggaggtactcccgcgagcacaacgccatcctcgggccctttggcgagcttatgaccgaagccgacatcctccgcatcgagcagcaaatcgagaacctgcaggtgctgcacaaggcgcagaagctggaggcgcgcctcgagcaactggagctggagctggagcagctgctgcccatctcggccgccctgtcggcgccgcgcttcaccgtcgatccgcgccgaatgcatggccgcgccgccagcctgcccgcctggtgcagcaagatctccacgttgctcaagaacatggccacgctgctggctgcgctgggcggccggcctgcgcacctggcggagctgctgaccgctgacacgggccagccgctggcgccgctgcccgacgcgccctggctgcccgggccgctctgcctgggtcgctcgcactcgctcagctggtgccgcgaggctgtggcgcgcgagatcctcgagtgcggcgtctccgtgcagcatctccgcgccacctacgagctgcgcgcacggggcgcggcgcccgcgcgctgtccgcgccgcaagcccccgcagtccgctggcgccccgggccgggagcccatcttggaggaggactacgtggcggcccgctctggccagcccagcgccgccgccgcccacggcccgctggtcgactgggagcccctgggcaccctgggcccgcccgaggtacaggatcgccaggcggcgctgcctgagcccgagcagctggcgcgccggccgcccctctgcacgaagctgcgcggcgtccaggactacctcgacctgcgcaaggagcgcatcgtttacctcttcctggagcactggcgccgctgggcctgccgcggaccaggccgccgcgcccaggcgcgcctacgcggactgctgccccgcgtggcggctgccggtgctggcccggggctggaggccacggacgccccccggctgccggcgagcaacagcgaggcccacagccccgacgaacggctgcggcagctgctgaggcagcggcaggcggtgggcaagctgctgggccactggcggagcctgctgcgtcgcgtgccggcaagcccgggcctggcgcacggcctgtattggccccagcacttcctgccgcccctggacggcggcgcacccccgcactacgacagcctcacgctcgacctcttcatgctcggctacttccagctactcgagatgggcctgagccgcgaggagcgcaagttccgccacctactgtgctacgagatgttcgaccgactgggcagccacccgtgggagcgcatccgcctcttccaccgcgtggtgctggaggaggtggaggccggccggcgcggctggagcgacggcttcgaggacctcaggcaccggttcttcggaaacggcctggaggctgagccggcccccgaagaacaggcgaaggaaaaggaagaggaggggaaagaacaggagcggaccgaagaggctgctccatttcagacgggggacccgcctgaggggcagcccgaggccctggcccctgcgccgcagccgccgccgccgcccccgcccgccgcgcctcccccgacctcagactctcctggttccgaagcccccgccgaagaccccttggaactggtgtctgagatgggcgagttcagcaacgaggacatctgccgctacatcgaccgcagcttctccttctggaaagagaaggaggcagagctgtttgacatctgagcagcggaattcggaattctcagttcaccctcgagcgtcttaacgtgggcctggacgcctgtctgacgccctccagaggctggaagcagcaggaagagcccaggactgtggccttgagcagcccggagggcccaggaccaggctgcctcagcctctgaggtcccatcgtggcgggctgtggggcgttggtcggataggcagggcaggcacagaacagaccaggtgtccgcctctggccccgtggccttgctgagctctgtgtggagccaggcagcagaagaagcccctctgagtgaggggctgcggctcctccttgcggcagtgtggcctgctctttggttttccactggagttcacagctacctccttggctgaggtcaagggtgcca

SEQ ID NO: 45252 - DNA, 987 bp, Homo sapien
cggggtgacaagattcccgtccccttcgaatccctcgagaaaagtccagtccacttaacaccccagccccgcagaaacgccaagaagccgtttttgttttgttttgttttctttcacagatttaataccgcgatctcagccaaactccggccgagaagttgagaaatgtcttcaccccctctcgacattcgttcgtgcttcttcgccttggctggagcgataggggcgagcaggggtggggccggctggtgctgctacgcagggccgtgccagcggcttaataagtgacataaaatgtctacacgcataagtaaccgtacttagggcttctgcaagggccaccagagcgcctaggtggcaagtgggcgccgtgtcacgggccgcgctgcaggcggctgcgcaagtcttccacgcagccgtccagccccatgcgctccagggccgcgtaaacggctccgaggcccgcgggctgctgctggcgccagcgcttgagcatctcgtactgctggtctcggaagcggccgatctccacctccacggcttcgatctctgcctcgcgcagccccagcgtgcgcacgaactccttccagcgccgcgctgggaccgcgtccatcacgtcgtagagctgcgggcccggctgcagcatcatggctggcgagccggctggggactctggcgagagtgtgggcgcagcagcggggcctggggcagggccagagagagccaattggggtacgtgggccgcggtcgggaggcagagtcaggggcgttcgtgcgggtaccccagggctgaagcccgctggatccggtgggtcagggcatagggcggactccgtcagttagggggcagaaagggaacacgttgtgaaaccacaacttcccaccgcagacaggagaatggggtcaaggcctcaggccactgatgtcccttaccaagagctctgctgggcaactggtcccaggaccatgtcacctgcgggcagagcg

SEQ ID NO: 45253 - DNA, 704 bp, Homo sapien
cggcaacccccgcagacacacacgcccaccttgtccacttcgtcgctgctgctttccaccacctcgtaggcgtcgatgcggctcaccacggccgccagccgctgccgctcctgccgctgccgcatgcacgcgttcacgtggtggatgaagcgctccacggagccgatctaggggcaggtgagggagcttcaggtccagggtcatgacggagcagagagccgcgcaggggggacggctcccgctggccatcagggttaccatggcgacgacggcctccttggcgcgcggctcctcggtcttcctcagcaccgacttgagcagcagcgggtacttggtgagccgctggtggggtttggccagcatgtcgctcagcttcagcctctggcactgtgggtgcttctccgcccactgcggtgggggagtgggggcgggctcagggcaggccccgccccacccggccccgtccagggtcccgtcctcctgcgcccccgcccacggcacgcgcgccctcaccgtgatgtaggcccggaagaggtcgttgtcgcgcagcaggccgcgcatgtactccatgcagccctcctcctccatgcagtagcggatgtagggcttgaagagcgagccgaactggcccggggcagaacaaccacggcgccggttaccgcgcgctccctgcgggccggcccgcgccaggcgctgcgcaagcg

SEQ ID NO: 45254 - DNA, 1127 bp, Homo sapien
gcccagcatagggcccgggacccacaggtgtgtccggagctggccccagacacaaagcgccaagaattggcggggacatctcagccggcggggacacaccccggagtccgaggtccccgtcaccagggtgcagctgcccaggtagggggctcggccgccatgggccgcatccttcccctgggggccgcggggcccatagtcacgggcaccccctccctggcctcccgcacaggactgggcggctgcaggcgagaactgggcacccagccccgttcccgccccgtcccggccccgtacctggctatcaccgtcgcgggcacgacccccggcccaggagggctccgagtcccggaggggcagccccgggcccggcctggaggctgctaggcgtccggagacaccgggtcctgtccccatggcggccggaggaagccgcggtctgcgccgcccgccggacaaagcgcggagccccgcttcctgccattgtgcggccgcgcccgcccccgccgagcgcggggaccccggggagggccgggcccggaacagcccccagccccccaggaaggcggacacctccctcccgcccgggccctcgccacccagccccggggatccccgcctccccgcccgggaacccctacacccccgcctccgcctgcccgggcgaccccccgcctccccgcctctgcccagacccggggactccacacccctacctctgcccggccgggggacccccacagccccgcctccgcccagtccccgggacccccaccttcccacctctgcctggcccggggtacccccacctctgcgcctctgcgcggccccgggcccctctcttctctgactccctcctcaacaccaatgccgggctcagagggctcctcagaacttgctctttctcctggggagctccttgaatgctggaggcagggggcgctggtgacacccccccccaccttggagactgtggagcccctcccctgggtgactcgatccccgcccagccctgggggtgcccactctgctgtggtccccacctcaccctcagcgccaacacgcacggtccctcccagccagaagggtaccttccctcctcccttcctcctggagacccccacccc

SEQ ID NO: 45255 - DNA, 819 bp, Homo sapien
cggattcacgggtctcccgcatcccccacccctaagtgggtgcctgggtctgctcagactgcccgaggcgcagcctctggcgccccctgccggcctcgagagggcttttccgcctgggaccgactccgggactggccagatggggaggatcggctgagcctcccagccacgccgcgcgcccgggcccctccaggatccccctgccccgccaataccccccataccggggccagggtcccatagactcctcacggccctatctccgagccgacccaccctagagacactgtgatgggggcgggagcttgaacccattccaccctcacgtaaatggagatacagctggtgaggaccctgtacccacccacaggcctggcactacgtgggaatctcgaatccgggttctgtccatcggtttaggggggtcctggcgcctagtcccaccccccgtccggagcgcagctcccacttccccgcgactcacctaggaacaggaccagggtctcctccccggtgtctaaggctctaaggctcgggccgagactgccaaagcctcatggggcgcgcggggagagggggacgggagccgcgggacgggctcagtcgactcagcgcaaactggggcgcgggacgtaggggaattacggtagccgcgcgggcgctaccacctggaccggccgggatgtaccaacggcgccgcccggctgggaccggggagaggaggggtcccaggaagggccccgcgccggagccagggaggtggctggaggccgggcggtggcttggggtaatccaggatccgggctcaggggagggggt

SEQ ID NO: 45256 - DNA, 1173 bp, Homo sapien
cgcggtgggggcagagcggcgcaaccagcgagaggcggggggagggaggagaagcggggtgctgccgaggcaggccccgacttgggggccgagtttgggtacgagcggcccgaagcccggtcggcgcccacccccttgcctggagcgggccctccccggaggaggttaggagccggcccggccccccaggaccccgccccgcgtccgccgggtccccgcctgcactcacccatggagcaggccccgtgccgcgcggggggcgggcggcgggcgggggcgccggggacgccggggactgggaggccgcagagccgccgccgccggaccctcgcacgggaggcgggcggggcaggtgggcggggaggagccgcggcggccccgcctcgggggcggggggcggggggacaggagcgcggccgggcctcggcgccgacggtgtcacccctccctccccggctccccggcccctgcgcgctgcggtccggaggctgcctccacctcccggagggcgggcaccggggcggctcaggaagcgcgcacggctctgtcctggagggtgccatccacgcggagggtgcctgtccgcaggaatgcaggccgggagccacgcagagcccccaccccagcccggaatcgctgtctccgaggtcagtttccatggcaacacggaggctgccccgcgcagggtgagggctgtcaccgggagagactcgcctgccacggctcttgctgcatgtcctctgctggttcagttttaaactttattgaagtgcaaacgcggacagagaagtgcacctgtcctgtgagcacagctcaacacattttcaggaaactttcacaaaataacctgtgcccagaccgagctgcagagcgtccccacccagtccccagcccccgccacctccctcgtgccaaccggtccccccaagggcaccgccgccctgacttccaacacatcgattcgtctgcccggtcctgtagtttatgtaaatggcatcaggagatagcaaaccctttgccctacagaaacagcctcgcagaggtggccaagagtctgcgggggctcagtgctcctgagcctgcctctggacccccagcccaccctgcacactggcaccaggaggcattgcgccgacaagacctaggtatagaagatgcagcttccagcagggc

SEQ ID NO: 45257 - DNA, 764 bp, Homo sapien
cgggggaccacggtcctctcctaccctgcagctctcccggggctgcctctccagccctccctgccctcggggactactaccggcgccccccacctacctgctcgaccggcagcagcagcaacgcgcggccggggcccacgggccgcaccggtgggatgaggagaggccggtggcaactcgaggcggattcgagttcgggttcggactcgggttcggaggccggggtcgggctagggatcgggctgggggtcgcggtgttgggtctccgggccgccgccgcgcgcgacacctggcgggctccctccctccagtccacgccggacgcctgggcttgcagtaaccgccaccgtaggcgccgccgaccgcaccagcgcaggctcccgagccggcggcggggccggcggctgaggatgagctggggccgggccttgcggacccgcagccaagtggaacggcaggaaccccgctttagcagcagtcccgagtccgccatgctgggtcctcagggcctaccgcgcgagaatctcgcgagatcccgtcggtccgccccgctgccctcccagctgccgaaaagaggggcctccgagccgccggcgccctctgccggcaacctccggaagcacactaggaggttccagccgatctggtcgaggggctccacggaggactccatttacgttacgcaaattccctaccccagccggccggagagagaaagccagaaacctcgcgaccagccatgggccacctctccggaaaaacac

SEQ ID NO: 45258 - DNA, 2370 bp, Homo sapien
cgtcccagagtgggctctctcgcgaacatgcaaggctgggcacagcagctgtgacatcccagtccccacctccttgcctgataaccgcctcacacgcctgcctggtgggttctttccttatatagcagtcacagagaccgcccttcctcaccccgacaaaggaggtagcctcgtgtttgaactgggatttatctttaataaaaaccgtagaagcccaaactcaggcggactgggacccgcctaccatgactcggcagtgttttggggtttgggccaagtaactggaagaaaacctcttaacatgtgaccatgtttacaggctccggggagttcagcctaaacaccatgtgaccagagcacagagcctaggtgcaagcccaagggaaccttgtcaccgggtgacaaagagtgagtcagggggcccggtgtggctcagcagggagggagaaattccccggcttgtggggaacagatgcctcaccgggcgtcggcctcctgcccgtccctggattccttaaggagaaaaagaaagcacccattgtgcggggtgaatgccccagtatcttccaaccaagtggggaggcacctcctgggcacggagttggctcagcctggcagccccggccgcacggggcacagagacccacaagcagctacttgtcccggctcacacaaggggcccttcttcaaggttaaaagtatcgcccagagacatgtagtcaccagagccccagcttggactcaggtgcgcccctaggattccaggctctgtgcgcttcccccgcgaatagctgggctcccgtaccggcgaggttcaaccccagagagcctgcccagcccctggcccactcacccgtcacgtagatgtcattgcccagcgccacgatgctgtagcctccgcccaggtggtctgggaactcggccaggtagcgccactgacccgtctgcgggttgtagcagtcgacagtgaccagctcgtcacagtcctggtcgcagccgcccacgagcacgaggatctcggcgagaccggtggacgggcgaggacgcattcggggacagggcccgcggtcgtggcggtcgtagcgcgccgcctggaagtcgcgcgcctcgcgcagcaggcgcaggcagggtgggcagcgcgccaccagcggctcggcctcgacgtgcgccaacaggtagaagcggcgcacgaagggcaggcgcacggcctccagcagctgcggccagtgcgcggcgcggcgcggcgggtcagcgcggacccagcgcagcgccagctggtaggcggcctcctccttgggcacacacagcccgtcgtcccgcaggtagcgcagcaggcgcgccagtggcagccgctccagctgctcggcgcccagctcgcccacgtggcgcagaatgaaccgctgcgccgcgctcgccagtcccgagcagctgaaggcctcagcgaagtcctgcatgtccaggcagttggccaggtcgagctgctgctgcaggaaggccccgcacgcctccttcacggccgggaactgcagcaggtcggcggcgcgcagcagcggctcagcgttgtcgccgcttaccgccacgcggcccgtgtagctgaagtccagcagcagctgcagcatgtcgggaggcactccgtgcaggcgcacccgctcggcgcggctctcgcgcagctgccccgcgaacatggcgcggaagtaggggctggcggcggccagcaccgcacggtgcgccgggaagtcgcgcccgcccgccgcctccagggtcacgtccaggaacttgcgctcggcgcgcagctggctcaggccgcgcagcaggctcagggcgtgcgcggggtccgagaagggaagcacggccaggggcgccggtcgctccatggcgccttcgataggttgtcgaggacgccgcggccggggcctgcggagagacgcggcgcgctaggcaccgctgctataaatagggcggggcgccgcggctctcgaggggcgggatgggcggggagacgtctgcaccgcccccttaacccctctgtgccgggcgccaccgccccccgcgagcgcgggctcgcctgtcccccgcgcggcgcccgcccccggctccgcaggctgagtcaccgctgtccgcggccggctccctccctccgcccttctgcgtctccccgctgacgcccgggccggggacagcgagtgacaagtgccaggtccgagggcggcctcgccgcgcgccgggaccgggggcctcccggggttgcccacgacccacccggcccggctgctgaacccaacccgggagaggcgagctcggccctgaaaccaaagccacccctcctttcacgccagacttcccaagggcgccggcccaggtcccggggcg

SEQ ID NO: 45259 - DNA, 2925 bp, Homo sapien
cgccttttggtcaccgcataggggcagtccccaccgtgtccggccagccttccacacgtacagctgtcggatactctgcggtccagcgtttacacactgcccatcccagttaaacaccactaaacaagtaccagtcgatgccagcgccaaacaccgcgtctccgcctcgccctgcgggccggaggatattcaggagagtgggaaaacggccggtcccaaggttaggcttaggcggcaacagaaagcaaactgaacgcacacctctttagaacactgacaacgctggcccggtgtttttaatgcacgaacccggccacctcgagtgaatcccgcagatgcctagagaagagcccggtccagtcccggccccgcgggcccggagcagggagccgcacgaagcccgcagccgcgaaaacaacttcgctgagcccggcctggagcgggggccgggcggcgactccgccctcagcggggagcggggagcggggagcgatgcccggggcggccgcgacgtcagcgtccccgcccctgccgcccctactcccggccaggcctcggggacccccgccccacaaaggggcgcgaaccccaagtaggagacgaggaagggtaggtgccagccgccgccgcccttcgcaacccgggccgtcagccccgcccccaccgccgcagcgactcccgcccccgcgcccgccgagaccaaggcgctaccgctcacactgcccctccccccgcggccgagccggcgcgggcccccgcacctcccccgctcgcgcggcctcgagtccagaagacccgcctccacacaccggggccgccgccgcggagcctcatgggggttggagtccccaaggtttcctttgtgcgcagtattggcggggccttggactaccactcccacaaggcaccgcgcccgcctcccgcgccacgccccctcgccgctggcttccagtcgccacccagactacatttcccgacaggcctcccggctctcccgccctccctcccgagacacgagccgaactgggcgtcaggtcggggagccggtcgggttcccgctcaccgccgccgccgccgccccctgcagccactctcccgcctctaccgccgcgggagctgcatcgtccactccggtcggcggtggaaccgccagtccggggtcacagagcttgagaagcgacgcgctgagccccccatcacctccagcccgggcgacccctcccgggtccgccctcgccctgcgcagccgcccgagcccccagccccgggcggccccgctccagcatcccagctcctgcactctcgcagccgccgccgccccccgcccggaacatggactctgactcttgcgccgccgccttccacccggaggtgagtgaagctgtgcgtccgaatcgcccccgaccaccccctccgcgatcctgccgtcctcaggcagccagacccccggtcgcccggagcgccgccctccccttcccccgctttcccctcgtcggcccccccgggagcccaacccccgccccctgctcgggcccgcgctcggtcctctccgccgggcctcgcctccgcgtcccctccgcggacctccgcgtcctccccgcgccctttccccagggccgttgcgcctatttctctcccccgggccgcccctctccggcctcgcgtcgacctgggacctgtcggcgcccccagcccctccccgccggcctgcttactctttccccgcccccggggacgcggtccgagccgccgcccgcccctggctccggttgctctcgaggagttttaggcccccctcggaccggggtcggctcccgaggcccccggctgctcccccgatcccccgggcccggtggcccgcgccccgccccctgactccgcgcggggcccagtcggcccccgccccctacggctctcgggggccgcgtcctccgggggccccacccgctctggggacccgagtcctgcccccacccaccgccccccggcgcgctggcctctctcttcgggcccccgccccccgcccgcgggctttgctggctccgccccggctcactccccctccttccggggatcggccctcggggctcccggcctcccccccgcgcggtcccctccccccagccgaggctcgttggggtcgggggtgcgggtccggcgaccgcgggcgggtgggggaggggaggcggcgccggagcccgccggtctcgctgccgcccccgggggttcgcagggcctccccaggcctgggaccccggaatcctgcctggcgcacccccctcacacatactcgcgggatgggccccgcaccttcgggggccgagtgtcgcggggggcggctgccgcgggagggcgggtgggggccgctccgccatctgctttccgaggaggcggccgggggggcgggcggcgtgggccgtgtgggggcggcgtggaacccccagtccccgcgccggtgcctcccgcgcgcccccggcccgaggccgtcgccgccctccacttggcattcgggtttttgacccacttctgctggttccccgccgaaagaaaagttcttcgcgggagttggaggcccgggtggcggcccgcggttcccgtggctgggcaggctcgccagtgcggggagcgcggtcaacgcgggccttcgcctccgctccgtgggcggccctggggtccaagggggtgggagaggagaaggtttgcttgaaccaggttgagaaaataattttctaagggcaccgactttctcgaaagaaaacccgcgggccgcacgcctgctcctcgcggcgggaggggcggcccgagacccctgccccccatttccccaccggctctcccccagcagagtggcggccgggtaacagcacctcgggaaggatgggggtgggtcggacaaggcactgaaaggaacctcagggaacgtgc

SEQ ID NO: 45260 - DNA, 787 bp, Homo sapien
cggagcacccctttacgtggcgccccgggtcccgtccgaccctggggagacgcgggtggctgggatggcaggatgagcgcgccctggaggcgagccaggcccgtcaccacctcccagcggccccgcccctccccgcaggtccctcccctctccgcaggccccgccgccgccgccatctttgttgggggcagccaggcctggctcgagatgccgaagtcgtgcgcggcccggcagtgctgcaaccgctacagcagccgcaggaagcagctcaccttccaccggtaagaggcggggacccgggggcgcgggaggcccagacccggggcccgcggaccgactccgaggccttggcgcgccgggcgggaggcccaaaggcgtgcggccgctgggcccggggacaggccgaggtcctgggcccagaggggctggcgccgccgcgcccgccgcggggatgcggggagtggcggacggaggggcagcggcgcacctggcggggccagggccgggacgtgcagggagcggagcaggtgtttgctgaacagactagcgggccgcggccggggtttgctgtgtccctggtcgctgcagcccccgccgcgcgcggtcctgaagggagcccggcacctgggcagtgcagtggaggagtggaacccccaggggcgtcctggcagtgggaagggactctgcagggtcgcgggaggacgctggagactttggagtctgctccagcactcgcccggcccggcccggcccggcccaggagcaatcgtcattagtcacagttgcg

SEQ ID NO: 45261 - DNA, 920 bp, Homo sapien
cggaggctctgcctgcaatttctggacatcgggtccaggggaatgaaagagggcatgagacgcatgcctctgaggctggacccacttcagaggcagagcgtccccacgaaagactcgggaaccggaaaaagccctaaggacgttccctagtggccttgaccttggtgggtgagactcagttcgccatcctgctggcggcgggcgatgacacagcccctcagccaggacgagtatgtgggctgagcgcgagacggggtctcggaggactgctaaccccactacggtggcctcctcggggcccccgtttcctcttgagcgtgcgggggcctctggccctacccggacacagtgcacgcggcgcactggccttcaggagctggggcggaggctggccccggaacccccggcgggagggtctgggcggtggggacgcctccatcgggcggctggcgtgcacgtcgccggggtcacgcggcctccccgacggacccgagcctcccgtggcgggggtggggcggccaccgccagcccggccctcccgaacgaccgggctcggcctcagcccccagagcgtccagccgctggcctcacctccctgcgcacgttcagcaacgagtaatagtcttcattgtccagctcctcctcgctcaaggccgtcgccatcttcgcaacctttcaccccgccaaaccggcaaggccgtgctcaagaggggccagtgatccgcgtcagggacagcgcgggccagcccggctgcgccacagcggcccctggcggcccggagccgtccgcgcccggcgggagtgcgcctgcgctttgcgcccccgcgcggcctagggcgggacgcggcgcctaggcagccctggcggggtgaccacgcgggtgtctcttcgtgctcccaatggacgcgtggcacgcggcg

SEQ ID NO: 45262 - DNA, 1049 bp, Homo sapien
cgtctacctctttctacacagacacggcaaccatccgatttctcaatcttttccccacctttcccctctttctattctacaaaaccgccattgtcatcatggcctgttctcaatgagctgttgggtacacctcccagacggggtggtggccgggcagagggctcctcacttcccagtaggcgcggccgggcagaggcgcccctcacctcccgacggggcggctggccggacgggggctgaccccccccacctccctcctggacggggtggctggccgggcagaggggctcctcacttcccagtaggggcggccgggcagaggcgcccctcacctcccggacagggcagctggccgggcggggggctgacccccccacctccctccctcccagacagggcggttggccgggcgaggggctgacccccccacctccctcccggacggggcggctggccgggtggggggctgaccccctcacctccctcccggacggagcggctggccgggcagaggggctcctcagttcccagtaggggcggccgggcagaggcgcccctcacctgccggacggggcggctggccgggcggggggctgaccccccccacctccctcctggacgaggtggctgccaggcggagacgctcctcacttctcagacggggcggctgccgggcggagggactcctcacttctcagacggggcatccgggcagagatgctcctcacatcccggacggggcggcagggcagaggtgctccccacatctcagacgatgggcggccgggcagagacgctcctcacttcccagatgtgatggcggccgggaagaggcgctcctcacttcctagatgggatggccgccgggcagagacgctcctcactttccagactgggcagccaggcagaggggctcctcacatcccagacaatgggcggccaggcggagacgctcctcacttcccagacggggtgggggccgggcagaggctgcaatctcggcactttgggaggccaaggcaggctgctgggaggtggaggttgtagcg

SEQ ID NO: 45263 - DNA, 2077 bp, Homo sapien
cggtattacctgcccaggagcagaattccttactttctccggagagaggccggtccctgggagcgctgcccagccacccgcacgcctagccgccccgagagccgcactcggcggacccggttcctaggctcgttcccggggcacctggcgggcgcccacctcccggggggcacgtgctcccgtacgcagcgcgagggcagcgggtgcctggctatttattaggaaaagccccgcgcggactctccggattgaggagggtgggaaactcggctgcccagcgctccacccgggcggccggggctggcgcttctctgctttcggccggcggcctcatcctgggacaggcaaccatgagtcatccgctccgcgggtcacatgggcaacgtgaccaaaataaagtttcggtattttaagccgccagaaaaggggacaacggagctcaccgggggcgggcacaggaggcgggcgcaggcgggcggcgccggggccgtggggacgcggcgccgagggggcggggcctggcgggaggctcgcccctcccccacggccggcagcgacgcccggactcctaggcagtcggactccagggcgcggcacccctgcggacctcagccccgaggccccccgcgtccggctccccaccggcagcggcggcgggctgcgggatcccggagatcccggcgcgtcccccacagccaccgggaccccacgcgccagcagcggcttccccgggaacgtccttcagccccgggagcacgcgggaaaagccccagcgtgccaatgagggagcgccttcctcatgacggtcacgctcgggggcggggcttcccttcgccgctcccgagttccgggaaccccctttgattggtctggacggcctgggaaacactgtagtgacgcccaatcaaaacgccacgtctcggcctcgaggaaatattccgtgtcgggcccgtcctgattggacagttctttcgggttctggccactaggaagctttgtttaggtccggaaggcgggctttcctgggagtgggtggggagggggcgttgattcttgaccaatcctttcagtccgttgggtggtgaccagccaatgggccggatggataggacgctcctcccggagagtagtgagacccctggtgcggggcgattggcggcgggagcgatgagtggcagccgcacggcccaacgggagctgtgcgtgggccgcggggcggggccagggcgggtgcgcggcggcggcggggtggctgggccggcggcggcggcggtacgaggcgcgcgctcggggtcccggtcgcgaggaggaggaggatgtggcgcgcggaggggaaatggctgccgaaaacaagccggaaggtaagagccggagcgcgaggggctggggggcggcgcggcgggcggcgggacccggccccgccggacatcccgggcatcggcggcgccgggcgggagcgcgggggcgcggcgggcgggcgggcgggcgacccggccggggagggggccggcggggtgggggggcggagcgcggccgagtcctgaggtgactcgcggggccggcggagcgcggcgccccacaccccacccccgggggcgggctggggccggagggggcggggggctcgcggggcggggaccgggcccagcgaggaggaggagccggcggagggccggcgcctcccccacccggaccgggcatccccgccgctcccgagcccgctgcgcggcccccgcacccccggcgctgggtccacggtgggggccgcggggcggaaagtttatccgcctcgggtcctcctggccccgcgccccactgctccgggccggtccccgtcgggcggcagcggccggcgctcagccctcgccggccccctgctctccggcgggcagggccagatgtactctctccggcaccctcttcagccccgtggacacctccctgagcgggcggggggtccccgagcttctccccgccagggggaccccgtcctgccgagcgtccctcggccgaagggcctcgtgtgacccctcccccttcgcttcccgggaagggaagggggcctgcgcagcatccc

SEQ ID NO: 45264 - DNA, 1184 bp, Homo sapien
ccgcagtcgcagcgcaaagggggccgcgggaacagctagtcgggagcgcgggggtcccgggcctctggccagccacggggcctggccatgaactttgcgtccgggccaatgctgcagtggccgggcggtggtgagccttccgttccccgcctgtccctcccggcccctcccctcggtctccgcagcttctcggctcagcccctcccgtccccgcgggcgctgggccgattctccctccgcgctggccaggccgtggagacgggttcgccgcggagaggggaggagggctggggaaggggtgggcgccaggggactgcagcgcggagcaaactggggcacggctgccggcggcgcgcgtgcacacactctctcccacgcgcgcgccctcccgccgacgcgcagccgcaatgcggggcccttcgcggaactgctggcggcgccgcgccccgcggggtctggggccccagcagggactgcgaggaccgcgggactaggaaggcctgagcccggccacccgcctccgagtgcgccgcaccgtgcggcggggaccacaggccttcggtgggcggcgagccctggctccctcgttcggtggcctctgctgcatgtgggatgcgccctttgtcccctctgccatgcgcgggggaaaatgtttgagggcggggaagagactgtctgccctcatttgatctaaaacatgaatttgtttgcttggctaaaggccgggggggggcgtgggtccggggcgcagagaacacgcgcgcgcgcgcgcgcgccagcagcagcagcagcagcagctgctgcggcgaagtctttgtccccgcggcgcagcctttgtccccgcggcgtagcttttgtttgcgcagccccgccctgcggagggcgatcgtccccacgttggggccggggggcagggacccgacgtccccaaaatctcagctggggcgcagccatcctgggagagaccgggcgtggagatgggggaaggtgggaggaggaatcgcagccttctggatcccggagctgcagcgcctcccccagacctaggggtcttcccctcccttcccctgcgccccactgtgagctccagggtcaaaggccctgtctgctggacccccatcacttagcccagggttggcacgtggtgggctgcagtacatatttgtgatatgaatgcaggcaca

SEQ ID NO: 45265 - DNA, 1445 bp, Homo sapien
gtctcatcacaggtcttggggtcaggcactttctctgtgcgaggccgtgggactgcaaacagcacagggaaaaaagaaagcgggatccgctcgggacgcctgagcctcgattaagaggtgcggctcgggatttgtggccggggcgagagaccctcacgcagaagtccccaagtgcgcagggctggagctggaactttggaacgcggaggttagacccaaagggtgggcggagcctgcactccagctaagggggcccagcgccgcaccccctccccaaagccggagccgccgccaccgtccccgcccaccgtcctccgccccgccctggccctccccgggtcctcgggccccggccccctccctccagcctggcccccacgcctccccgctcgttgcgcagcgccggctcctcccgccggctgcattgcagacgccgccgccgcagggcgcgccggggccgcgcagggagcccgagcccgggaacgcgggccctcggcgcggagcttcgggcggccccgacggcgcggggagccaggcagggcgggcgcggggcggccccgcgggaaggggaacgggaggcccgcgcggggctccgggggccgtcggcccgggcagcgggcgcagccgtcgggctccgagccgtcccggcctcgagggaaccgtcgccgccccattcgcgggccgcgctgagccgggcgggcggagcggcggggaccgcgtcgcgagggaccgggggcccggctctcgcgcggggacgcccgggccgcgctccgcccgcaacctccggccgggcccccgccgtccagcgcggctcgggcgcagttccggcgcagtccccgcgccgagcggctccgcgccccgcaccagcctctgcccggctccgggtgacgtcgcatcctccgattggaccacgcggcctggggggcggggtctggtccggtgagctcaccgccgcgccccgccattggtccgggcggcgcactcgggcagtggcggggagaccgcggtacccggagccccgcgagtcgttccagctgcggcgagtggagctgagcgggcgcggggccgggctgggccgggccgggcggggccgggcggggcgcgggagccagtgagcggcggctcggcgcaagcctgacgagcaggagccgagctcagcaggtccgggtaggtgcgcggcggcgcggggctaggcggagggcgcgtgcggtcgagggcggcggccggcgggggcgcgcgcggggcgggggcggggccggggcgtggggacacgcgtgctcgcgggccgggggcgtggtgcgcggccacgcgtgtttctggcgcgagtgtgcggggccaggccgggagggcgtgcgcggaccgggcgtgtttacgcgcggcagggaggggccacgagggtgcgcgcgtttctggcgcgagtgggaagtgtggggatccggcgggcc

SEQ ID NO: 45266 - DNA, 707 bp, Homo sapien
cgtgtccatgccgcgagggtgtgtcgacgcccgagcctgcgtggggcccggggccgtgtgtctggagtggccgagggcgtgaggggcgcgcgtgtttgtgcgaggggcgtgtgcggcgggtgtgagccacgcgtgtctgggtgcgcgcgcgggccggatgagcttctggagtggtgcgaggacgcgcgcgtgtgtctgtgtcggagcgagggcggggacgagcgtgtcgggcgcgcgcgggcggggctggggcggcgtcggggcgcgcgggggcccggcccggccggcggcgagtgtgttggggcgctcggcttctcctcaacacgggtttttgggacccagtgccgcctccttcccgcggcggggcccgcggagctcccggtttccctgggcagacaggtgcgaggcgaggtgcgggcacagccctgcgctcctcagcgggtgcgggatcgggcgacgggggactgtctctaactacagaccaggggagcggagggacgctcgattcacccgcgtgcacagggcagtcctgaaagtggatggaaggctcggaggaacttctgagagctttgcttccctgcagactggcgaccagagagcactttccacgcgcagatgggccaggatagatgctcggggtggcccttttgcattttcggagctctggtgattgggtttctaggtattgcgcctctttagaggtggcg

SEQ ID NO: 45267 - DNA, 731 bp, Homo sapien
cgtttacagaccacgtccccaagcgccagcgcggacggcggtgcggacagggagctgtattgacctgcgttctgcgtttcagagcccggaccgccctgggacccctgtggccctcaagttcccaagtgacctcgtccggggaggggacgtctcgctctgaccccgccctggacgcacccacccacgacgcccccgcccacttccggcgcgccccctcttcgccccgcccactcccccggctccgcctagtgacgtctttgccccgcgccgcgccgtcccacccatctccctggcctccggtcccaacttcgcttctctgctgaccctctctcgtcgccgctgccgccgccgcagctgccaaaatgtgagtgacgctacgcgacgcgggcggcttcgggccccgcaggcggcagctcgcgctgggaccgccatactgcccagttgccgccggccgccactcggacgcaggccggggctgcgcggggatcccgaggcctgggggtgggcggtggcccttgggtcgcgggctgcagacgggccgggcgggtcccgcggccatcgggcggacgcggaaggggcaagggcggggcggcgagacgcttcccggaggaagtgagctgcccgcccgcagcccgctcctcgccccttccctttctagtccccgacgtccctgagaggaatggggacgacagccctggttcgggagcgcccgctctcggcccggtgctgcg

SEQ ID NO: 45268 - DNA, 1644 bp, Homo sapien
cggttcctccaagtccaccccactcaccgaaagagttagcggaggatgggggcggttggggtgggctcggtaggtcacgggcggtgaaaaccgtgggaacccagaaagacggccaaagcacgatgaggaccgctgccggcagcccgccccaccctgggctcctccccacacccgctcgggcagccgggagccacctacaaactccaggactcgaccccagagcgctggcctgagccgcccctgctcgcccccagtccccgcctctccctccctctaatgcccccgccctcgacaccgtcgcccccccgcccctgcctctcgctccccacgtctctcggcacccccgctcccatccgcccccccgtccccgcctctcgcccccatccgtccccatttccagcctccccctgaccccgactcaagccccccgactccgcctctcgcccctctctgcccccgcctctcactcccctctccttccccgcccgcctctcacgtggaggttgggccggacccgccccgccccacagagcccgggtcccgcccccacgtggctggcagcttcctggccctatcatttctgcgctggcttcagcggctccgccccggcgccgtgccagggggccggacactccagtcgcgcggcacaggcctgaggccgctgagggccaccccgtcccctgcccgcccgccggcctgctgggattggccgagcgccggcctccgcccgagcccgcgcgttatgtaacgcgccccgggggccccgccccctcgccctggcttatataacccgggcgcaccggctcgcgccccgccccagggccaatggaggcctgcggagtcggccccgacgaccaatcgcacggcccgggggcgggaccggtcacgcggcggcagggggcgcggcgccggctgctgaccggcacgcggcgagcctcgagactgcgcgagggcggccccgggggcgagcggctgtgcgcggggccaagggcgggggcagcaggtgagtgcgcggccgggcgggagttctgggcggccgggcgggagttctgggcactcgcgcgcggcagaggagccccgcgagccctgccctcggtactgggggcccccggagcgtggcgcttccgagccacccgcctccccgggccccatccctcggcgcgcgggaaagttggggcaggggtgaggaccgcgcggtcggggcgccccagccagccgggccgctggcgtcggactgtctgttccatttgtcccttgtcacccttgtctcctccccctaggccggagtcctgaaagtcgagcgagctccgggttttgaaaatgttggagggaaaagctcctcggagatgagcgtgaccccctggctcgtggtggccgcctgttctcactaacgccatggcggggaccggagtgagaaaccggtgtctgtcactgactgcaaagtgagcgagaagcaggctgcgggccgtcccagcacgacgtggagccccgcggagacctcgagatgccccgcggggaagctcctggccccgggagacggggggctaaggacgaggccctgggcgaagaatcgggggagcggtggagccccgagttccatctgcagaggaaattggcggacagcagccacaggtgacgcgctgg

SEQ ID NO: 45269 - DNA, 1268 bp, Homo sapien
cacgccgccacgcctgactggttttcgttttttttttttgtggagacggggttttgctgtgttggccgggctggtctccagctcctaaccacgagtgatccgccagcctcggcctcccgaggtgccgggattgcagacggagtctcgttcactcagtgctcaatggtgcccaggctggagtgcagtggcgtgatctcggctcgctacaacctccacctcccagccgcctgccttggccccccaaagtgccgagattgcagcctctgcccagccgccaccccgtctgggaagtgaggagcgtctctgcctggccccccatcgtctgggatacgaggagcctctctgcctggctgcccagtctggaaagtgaggagcgtccctgcccggccgccatcccatctaggaagcgaggagcgcctcttccccgccgccatcccatctaggaagtgaggagcgtctctgcccggccacccatcgtctgagatgtggggagcacctctgccccgccgccctgtctgggatgtgaggagcgcctctgctgggccgcaaccctgtctgggaggtgaggagcgtctctgcccggccgccccgtctgagaagtgagaaaaccctctgcctggcaaccgccccgtctgagaagtgaggagcccctccgtccggcagccaccccgtctgggaagtgaggagcgtctccgcccggcagccaccccgtctgggagggaggtggggggggggtcagccccctgcccggccagctgccctgtccgggaggtgaggggctcctctgcccggccagccgccccgtccgggagggaggtgggggggtcagccccccgcccggccagccgccccgtccgggagggaggtgggggaatcagccccccacccggccagccgccccgtccgggagggaggtgggggggtcagcccccccacccggccagccgccctatccaggaggtgaggggcgcctctgcccggccgcccctactgggaagtgaggagcccctctgcctggccagccgccccgtccgggagggtggtgggggggtcagccccccgcccggccagccgccccatccgggaggtgaggggcgcttctgcccggccgcccctactgggaagtgaggagcccctctgcccggccaggaccccgtctgggaggtgtgcccagcggctcattggggatgggccatgatgacaatggcggttttgtggaatagaaaggcgggaagggtggggaaaaaattgagaaatcggatggttgc

SEQ ID NO: 45270 - DNA, 967 bp, Homo sapien
cgtctcttacatatcaataaatacaacttgagattatgatgtaaatacatctgaccaacttggtacttattagacttatgtgcgcagcactgctctagtcctgtgggtgcagcagcatcaggatcgttaaagaaaacaaacaatgctgagaaaaaaactcacacccctgagacatccgggtgtgaataaatgcggcagagtcgcccgagatcgggagaccaggcgtgggggagaggtccgggaggcctggaccagagtcctaacagaccagaggcgaaacgggaaggcgcgccagaaaaggaacaacgcaaagggagcaggcgtgcacggagcgcgaactaaggaacccctctgacaaccccagtccctcggcagttccagagaccggctcctcacggagggtggcggtagagactgttaagccccgcgggcgccggggcaggccggactgtgccattcgtggggggtaccatgtgggaccgagccgcctcacccagggctgtccagctagaaactccccggtgccacccccgcctcagtccgaggtagactcggccggacgtgacgcagcgtgaggccaaggcggcgtgagtctgcgcagtgtggggctgagggaggccggacggcgcgcgtgcgtgctggcgtgcgttcattttcagcctggtgtggggtgagtggtacccaacgggccggggcgccgcgtccgcaggaagaggcgcggggtgcaggtcagcgccagcgggggcgcggcgcatgtgtgggccgtggcgctgggcggcgtgggggtgctggacggtgtccctgtgctggacggtgtcccgctggctcagaaccggcgcggggcctgggtcggggccgccctcgcttccggcctcccagtcgggccctgtcgctggcgttggatttgactgaccgccagcgtggtggcaacgctgaagcgtccagaatcttctgcctaacctctcgc

SEQ ID NO: 45271 - DNA, 1236 bp, Homo sapien
cccgccgggcaaccccgcgagcgcaggctgcgggacgaggaccttcatgctcgccgctcccgaacccccgtccgctcctgcggtcccggtgctgcggggacgtatcccgggcgctcgggtgcatggccccggccagccgaggggccgcgcgacgaccacagccggcgtggagaaggcggcgggcgccggcacttcgcggcgtccccaggcccgggctgcgccgccggggagggtcccgctctccacacctcaatggggagaagcccgcgagcgaccggccggcctctccctccatcccagagactccgcgtcgcggcgaccctccccgcgccctccacgcccccgccctcgcgtcggggagccgcctggatcccggcgcccggcgcggggccccctgagggaacggagcgctgcgtggccctccccaccccctcagcgcgccaggccccttaccccggaggagcggcggctgccccgcggcgccctcccgcgcatgtccgtcccggctggctcagcgccgcgggctcaggggcccggacatcgcgcaggcgcctcttgctggctcgcgctcccgctagcactctgcctcgcaccggaccgccgtcgccgcggctgccgccgccgcctctatatatagcataggccgccgggccgtgaggtcgccgcgtcccgccccgcctcctcccgcagccaatcagggcgcgcgccgcttaaaggggcgatgccgtggccgaggcgttgcgccgggcccaccgtggcgtatcgcggcgctgcagggagccggctttgtctcccggagaggcgtctccgggctgaccgcggccgcagctccgctcctctgcctgagccgtgcggcagccctgggagcctctcaacgccgagctttcctcagaagcccgcggcgacccgggcctcggccgctgttcctgcccgaactgagggcacatcgcgcttcgcgcgggatttcccataaattcaggctccgggcaagattgtgtgttttttcctctccgcgggccgccgctggccgtgtgggccgaagaagccctggagggggagaggggagccgctctcgactgggcttgcggcgtgggagggacagtgagggacacttagggactgtgtggggcagtgaaggatagtgtgggatgatgagggaccgtgtggaccggtgagcgactgtgtgggacagtgcgggacgatgagagacggtgtgggacggtgagggacagtgcg

SEQ ID NO: 45272 - DNA, 752 bp, Homo sapien
cggagagcagagggaggcgagggagcagaaggaggagcccccaggtgggaggacgggggtctgcccagctcggccggggagtgcagtaggggggcgtcctcccgactaagggcaaaggaggtgacggcggggacgcccgccccgtgacgaggagggctcggccgagccgtcccggggcgacaggaagcggccgccctttgaaggcccagcggcggcgctgggtcagccaggccagcttgtgggggagcggccgcccgcgcacggctggggccggggccagggccggagggcgccgcaggaaggggccggggccggggcggcttctctccccgcagccggcgcctccacgcggcggtcaagctcgcgcgtgggctttagcagtttcgggcgtgcacgtgcgcggaggctcctgcctctgcggagctcgcgccctcaagagacttccaggagggtttggagcccgggtttctctttcccccagccccggaacccgagtctgctccaagtgcgcatctgcgcggcggccgacggggacgcagcccggtgtccccggcaggaccccggagcaacgtctcctggagcctgtgcagaagctgggcttggcgagggagggggtgcttccggggacacccgcgcagggaaaaggaggatgctagtgacccatcctttctcgccgtgcgctttaatttcaacaaaccctccattccccttgtgttcccttctccagctgcaaaattaaaagtatccagggc

SEQ ID NO: 45273 - DNA, 630 bp, Homo sapien
ggaactttgccttgttcttgcggcatccccagtgccttggacagctccgggcccagagtcgcgacgcctccagcaggcccggctgccccactgcgcacatgggcacaggcttggcacacgcactgcggcattcacgtatccgcgaacacatgggtatctatttatacatgaagacacgaaaatgtatttatttcttttaaaatcagaagaaaacggtgagaactgtgaggccggggggacgttttcctccgggatcctggcagatcctgcagaccgcgccgtcgtgcgcgaagcaccgggacgggcctcccgcgggaagggcccaggaggacaccgggctcccctcccgcccgcggggccccagacgcggcgccgctttaaggctccgggccccgcgcggatgcggaggctgcggccgtgacgtcagcgccccgccccgggtgatgctgcagcagccgggaccgcggccgggcaggcagcagcccagcggggacagggatgcctgccgtctccacccacaggtaccaccgtctcctccgcgccctccgcccgctctctggctccgtgcctgccggggcgccgcgccctgggccccggggtagtcagggcgccgagaccgggacccgaggc

SEQ ID NO: 45274 - DNA, 1137 bp, Homo sapien
cggtgactcttctccagaagggaaccctagggggttaaaaggccgctttccttaatccaaagaatttgccaggaggcaccggaaggcaccagtatcacagaagcccaccgggaacacgaaagccagcgggcctgccccaccgtccgtcattaaaagccactccgagacaccagagaataaccagcaccccttccgccctcccgacgccactcgccgcccccatccattttcgcagcagactcgtccctaaccccagcccggagactttcactttgtcccatgcctcccgagcacccctccccgccccggtgggggcagctcctggctccgagcccccacctcggggctcccagcctggtcccgggcggccgaccccagcagccacaggtaagcgcccggggtccggggcggcaagaggccgtcgcctgtcactgggctccggctccacaaagcgcagggcggaggcggccgcgggtggctcggcgtgtgaccgcggcggggccgcgcggcgcggggcccggggggcgcggggctggggccgccgctgacgggggaggaggcaggagcgcggcgcgcagagcccggcgcggccgcgggcggctgcaaaaggcggcctggattgccgccgccctcctgtccgccagccggggccccgcgccccggccccggccccgcccccggcccgacccccaccccgaggccggagcctccagggcacccggcgctggaatctgtgtcctccttccggacaggagaacatcaaggcggtaaagcacagaaacttcctccctaccgcagcaagcgtggggagagggcgcccacagggctggggcccttcccaggctgctgggtctccagcccacgttccggatggacgaagtcggctgcgccccggccgcacgccctccgccccaaccccgcctcagctgcgaaacggggggctggccccgacgccccccgcggtcccttccggcccgcgattgtgggcggcctctccctggcggcccaggcattagcctgcacttccccggccgccgcttcacaactaaatcaccgcggaagcttcccagccaataaatcacctgcccaccgggcagagggtccctcccactccctgtgtttgagacccgccaggcg

SEQ ID NO: 45275 - DNA, 2110 bp, Homo sapien
cgcctgccttggccccccaaagtgccgagattgcagcctctgcccggccgccaccccgtctgggaagtgaggagcgtctctgcctggccgcccatcgtctgggatatgaggagcctctctgcctggctgcccagtctggaaagtgaggagcgtctctgcccggccgccatcccatctaggaagcgaggagcgcctcttccccgccgcccatcgtctgagatgtggggagcgcctctgccccgccgccctgtctgggatgtgaggagcacctctgctgggccgcaaccctgtctgggatgtgaggagcgcctctgcctggccgccccgtctgagaagtgaggaaaccctctgcctggcaaccgccccgtctgagaagtgaggagcccctccatccggcagccaccccgtctgggaagtgaggagcgtctccgcccggcagccaccccgtccgggagggggggggggggtcagccccccgcccggccagccgccccgtccgggaggtgaggggctcctctgcccggccgcccctactgggaagtgaggagcccctctgcccggccagctgccccgtccgggagggggggtcagccccctgcccggccagccgccccgtccgggagggaggtgggggggtcagccccccgcccggccggccgccccgtccgggaggtgaggggcgcctctgcccggtcgcccctaccgggaagtgaggacccctctgcccggccagccgccccgtccgggagggaggtggggggtcagcaccccgcccggccagccgcccagtccgggaggaaggtggggggtcagccccccgcccggccagccgccccgtccgggaggtgaggggcgcctctgcccggccgcccctactgggaagtgaggagcccctctgcccggccagccgccccgtccgggagggaggtggggggatcagccccccgtccgggaggtgaggggcgcctctgcccggtcgcccctaccgggaagtgaggacccctctgcccggccagccgccccgtccgggagggaggtggggggtcagccccccgcccggccagccgcccagtccgggagggaggtggggggtcagccccccgcccggccagccgcccagtccgggagggaggtggggggtcagccccccgcccggccagccgccccgtccgggagggaggtggggggatcagccccccgcctggccagccgccccgaccgggaggtgaggggcgcctctgcccggctgcccgtactgggaagtgaggacccctctgcccggccagccgccccgtccgggaggcaggtggggggggtcagccccccgcccggccagccgccccgtccgggagggaggtgggggggatcagccccccgcccggccagccgccccgtccgggagggaggtgggggggtcagccccccgcccggccagccgccccgtccgggagggaggtggggggggtcagccccccgcctggccagccgccccgtccgggaggtgaggggcgcctctgcccggctgcccctactgggaagtgaggacccctctgcccggccagccgcccagtccgggagggaggtggtgggtcagccccccacccggccagccgccccgtccgggagggaggtggggggatcagccccccgcctggccagccaccccgtccgggaggtgaggggcgcctctgcccggccgcccctactgggaagtgaggagcccctctgcctggcgagccgccccgtccgggagggtggtgggggggtcagccccccgcccggccagccgccctatccaggaggtgaggggcgcctctgcccggccgcccctactgggaagtgaggagcccctctgcctggccagccgccccgtccgggagggtggtgggggggtcagccccctgcccggccagccgccccatccgggaggtcaggggcgcttctgcccggccgcccctactgggaagtgaggagcccctctgcccggccacgaccccttctgggaggtgtgcccagcggctcattggggatgggccatgatgacaatggcggttttgtggaatagaaaggcgggaagggtggggaaaaaattgagaaatcggatggttgc

SEQ ID NO: 45276 - DNA, 864 bp, Homo sapien
cgcccgcacttgtccaactttctggcccgagattcgcgtccccctcgacgcacgaggccgccggccacttgcctgcggcccgctggcggcgagagctgagcccgcgggcctggtcctcctcctccggcgcagggccccgccaactccggacccgcggaaaggggcggcgcaggcgggcaggtgggggcccggggagtgaagtgcacttgctaaaacaaaaggaggcctgagcggccgcagggcaccgcggcgcgggcgcaggtcccggcggcttggcggctccgggaggcggtggccgcgcggggccccgcccgcggctagggaggcggccgccctggcccgagcctgctgcccacggccgcggcactcagctcgcactccttcagcccgggaggccgggccagcactgccacatgccggtgacccagacgccgggagagaaagagcagactccccgcgacggcggcggccggcaaaacccgggctggagcccagcccgctccgcgcgcacccctgctggccgccgccgcgggcgcgcgcacacacaatgccagctgcaattttatctccttcgttgcttggccagcctccacccgctccaatcctccctcccctccgacagccggaactgggagcctgcgtgattgatggcagctcttaatagcgtggtcagctagaaaatgcatctgcaagcaagatattaaagaggcagcgcatccctgtgagtgatcagcatttcacacatcctagagctgcctctgcttctgccaggaatattaatgccaaccacctctgacgtctaataaatgcagatgaaacaaccaacaatcacagacaagctaaacatttatttcaaagatgcac

SEQ ID NO: 45277 - DNA, 690 bp, Homo sapien
gggaccgaggcccagcggggcgagcgtctcggggtgtgcgggaggctgaggaggctccggagcgcggagggttgctcgcgagcgtctgtgggaacagcggcacctccgcgatggtggcggagccgcggcggagctgctgcaccgacccgccgcccactccccgctcgggcccggcccacctcgcagtatcgcgcccctccattggtacagcgcggtgtgacgcggccgggggcccggccaatgggaggcggaggaggcgggatctctttttccttttttttttttttttttttttttttttaatctttttaataaaatgagcagagaagaaggcggagagaggccgagccttgacaacgccgcggcccggggctcgagggctcgcgctgcaggcggcggccagaggcggtgggctgggctcccgccgcgggcgcgtctttgtgagagtgcgaggccggccctcctccgccgcccgccgcgctccagtaccgccccccgcgccccccgggctgggccgggctggcggcgcgggcaggtcccgggtggggtggggggaagtccggttgatcttgctgttacccgggtcttaattggccttttcagtcattaggacgcggatccatgttgctgcgggctacagagtgggtgtaaaccattctcatatggactctttcgaaattctgatgagcg

SEQ ID NO: 45278 - DNA, 1440 bp, Homo sapien
cgcttactaggcagaagcgcgggccgcgagcgcgggcgagaggcgggggctaccggtgggggagggggccgcagcctcgtggccatctccactatcgccgccctcctccattttaggaagggcctggcctgagtggccaccgccgctaagtctgcgtctatcccaaaaaccttacacttggctacgatggaaaagcaacttccactcccaactcccgctgtgctaagcagctcgcgtgtgcagctcccgaccttccctgacagtgactcggccccgcagtcggtaatcacgtgttgatctgcactttcccctccaaagaaatcgggggcccagcacgtgcgcctggcattgcgcccccgccccgggcctcggggtgagcgggggcgccagttcccacccagggaggcggcttgcacgtgcccccgaccccgccacgctgggcctgcgggcgcgccgcctccctcggagggaaaagagccccacaagcccagaaaagccctgcgccgcctgcccgttgctcagcccttccccaatcattacctagccactgggtctcgtcgcctaggagaggaagcggagggtgctgcagacaccgaggtgaacgtaaagccggcgagatctccgtgctccgggtacccacagatactgtccgcgccgcccgcgccgacttcctgcctagctaaggcgagccccacccacttcccgcctccggggcacgccccctcagctccgcctcgccattcgtcgggagagccgtcactcattccctcacctcccggaaaggggtgggactgcgacggctgcagtagcgtggaaaggggggtgacgtcccgcggacttgaggcgggcagatctggggggccccgactccccagcggccctgtagtggtgcgggcgaaactctggccccagataggaccggtgagccgaactggggtgtgcggagccggggctccgggggatggcccggggcggcgtggcgggcatgagagctcggggctccgtcacgtactccgagtcccgcacgcactcagcgtcgctctggggccccacgtccggccctcgaccttgctgacaactttggcggcccgggcctgccgcggccctcctgccccgcccctcctgcctcgcgccgcgatccgagagaccccgttggcgtcgagtcgttgagaggctgcgcgcctcggccccactccggggttggggcgctggccccgccgcagcgctgcgtgtccggggccacgtgcgccgcctgcgcctgcgcgctgccctccagccgcgcccgtctggccgggctccgcctggcacccgccaaggtgaccctgtccctttctccttgctgcggtgagaatcaggccgagacagccaaaggaaggttcactttcctttaattctacctcatactttttgagtgccttctaggtgtccggcgcgccccca

SEQ ID NO: 45279 - DNA, 1035 bp, Homo sapien
cggagacgctgcccccacggagcctgctcccatcccgaggtggccgagcctcactccgggtagcccgggctcggagccacccagcagtgggcgctgcctggtccaggcacgcctacatcccggtcaggtggtggccccgggcccggtgcggctcggcagccccaagtgtgaggggctggtgcggggccacctcccacacagagtttctgtagtagcggctggtcctccacgttttggggccacgggctgcccttttggcggcgccgaggctggggcgtggggcccgaggggccttgggtggaggctgtgggcagctcccaggacactcacggcgcagaaggtcatgaccacgttcacggccccggtgccggccgtcacgtactgcacgtgctcctccggcacgccggcgctcaggtagatctggtccgcgtagtagtagatctgcaaggcaagcgcggggctgggcggctgcccggaggaggcggcctcggcgccaggacccacgcccggcgccccaggacctgcgccccgcgccccccgagccctccccagctcccgagccgcagcccggcccatacagcgttgacgcccgacagctgctggccgcccatgaggacgatgatggacagcagctgccagcgcagcgagcgcatccggaacagcttcagcacggagatgaagcccgcggccttctctgcctcatcctcctgccggatctcggccacctccctgtccacagagtcccagccgcgcagcgtctgtagggctggggagaagcggcaccgtcggaccagggctggggagcagaacctggaggccgcccccgccagagccctcgttacctttcttggcggccgcttcgtctttcttctgaatcagcaggtacctggggctctcggggaagaagggcagcagaaggagctgcagcgccgcggggaccccggtcagccccagcaggatcggccagcctgggaggaaggcagcgagctggcaccagcggcctccccaccaccccgaaggcgccctctgcagagc

SEQ ID NO: 45280 - DNA, 1281 bp, Homo sapien
cggctctgggggcgaactctgtccccactaccccaaggggctgtgccctggggcaggcacagcggggctccttcgggagggagcgaatctcgggcaaggctggcctcctcccgctggcccaggacagcctcgggggcgccagcaggcactgcttgctgtgggtagggggtgtccaacctagacgcggcctctgggagggcaagaccgggaggggtcggcctgtgtcgggggctcctggaaaagcagcgccaccgccacccacctgacgacatggaaggcccaaagcaggcgatctgtgcgaggcccgcgcgcggcgcggacgatgctgaggtacaagtagagcgcaatggccacggtccagaagaaggagctggtgttggcgaaggtggacagcgcgccctgcagcacgcagtcccacgacgggcccgcgaagttctgcagcactccgtagaagtaggaggcggccgagagcaggtcggccagcgacaggaagagcagcaggcgccgtgcccggctgcgcaggtcgggccacagggcgtgcgtggccaccagcaggcccgagccgagcgcggagagtgcgcacgacagcagcaccacggcgcgctccgacggcaccagctcggtgggcggcggggacggctgcatggcgtggggggccaggagccggagcgccgcgaggacagaagccgggccgcgcgtgcggccacgccgccgccgtctgggcaccgaggcgccctaggctcgcgtccaggcgcccgccccgcccgcgtccggccgctcccccgcccatctgggccccgggccctgaaccccgtccacgccctgcgccccgcccctatatcccgggccctgagccccgcccacgcgccgcgccccaccccggtaccccggcctttaagccccgcctacactcccagccccgtcccgccgtcccaggccctgagccccgcccacaatccgagccccggacacacgtcccccggcccacatgcccttcccgcccacacgccccccccccgcccgtgtgcccccgcgttgagactgggacttagagctccgcccacgcgccccgatcccctgtccacagggcccagagacctgggcctagagcctaacccacgcgccccgctccgcccacgcaccccgccacacccctgtgttccgggccctgaccctggctcaggtgcccttcctcgtcccgttgccccgggccctgagccccgcccccgccacgcccctgaggcttccaagctccacccggtgcccgaggctcctgagccc

SEQ ID NO: 45281 - DNA, 1461 bp, Homo sapien
cggagcttggctgcaggactcccgcaaaatctccaaatgcccccgatctgcgtggtcaccgagaagcagcccggctcggaacaagcccaggcaagcccaggcagagcccgccgccgggtcctccttcctgctcgtgccaccaggccccggggccgcgacgcgtctctccagcccgggatccggggagctgggctgtccccagaccgacgggacagcggcatctcctccacctgaaaaggaaagaggaccaggtgggggccaggcagggcgcatgaaggcggcgccagcaccgcgcgatccgaatcacgtcggtgcgggggaggggtcggagcctggcctcggcctagggcgcagatgcggtgcgcaccgcaggggggcggcgtggggtgcggggccagtcccgccgggcacggggtcctggtcctcatccccttcaccgccgccgcccgcctgggctggcgtttccccagcgagagcgcgtagtttgcgcagcgcccctcgcccacgccgccgctgggtcgcggggcgcgcctacccagagccgaggtcccggactccccggccatcgcgacccttccggggactcctcgccccttcgcggtgggaccaaggcccgggtggggccgggacagggtggtggggggaagggggaccgtacaaaagcaaacagaaaccacggggggctcgccgcgacgcccagtccgagggcctctcgcctggaagagggaagaaacccacgtcctggacgcgggtgtggggtctgtcccgggtcaggacctgttgtctctgcgacgttgccagtccggagagctcggagggccaatgcagccccggattcaacaagatgcgaaaggacttctaaagccaggaaccggcacccagccacggccaccgcccgccggcccggcgccctgcccccactcactgcgcccccaagttccggcgccgcgggctgcaggggtgacttggctcggcgtgcctcggggcacgaggctcggccccgcacggctctcgggtcccggggggctggggtgggaagggacatggccggcgcgcggcgctggggagccgggtgcgccaggctggggaccttgcgtggggcagggcttggctcagccgaggggccgcggctcagcccccctcaccggccttaaaggttcccagagacgcaaagtcggacgcgggtcctgagcgcggagctacaggggggagcatggggcagcccccaaggcgcgctccctgcatttcccaccctttccacgctgccctgcgcgcacggtcgggcgcccttggggtgggcagggaggcgcgggcaggggcagcgccgaagacctcccgccgccatggagaaggggctccccacccaccctcctgccccaaccattatagatcccagccagtgcgccccgcgcccttccgggacaagctgcccccaggaccaccgtgccccagtatcaagcg

SEQ ID NO: 45282 - DNA, 1164 bp, Homo sapien
cgcttactaagcacccaagtgccagacaaccccggaggcaggtactcccattgtccccactgtacagatgaagaaactgaactcagggtcacacaagtgataaggggtggcagagatctgaagctgtgcgcggaggcgtggccagcgtgtgcgctccgacttctaaatccctactctggatattgaagacgggaaagaccgagccgctcattctacagatggggaaaagcgaggcctgaggagtcccagagcgggtgccagatcgtagggagcagccagcaccccgggtcccctccacgacacaaccacgtccctcggccacttctgggtcccgcgcgcgtctcggacgcggcaggacagctctaggacgcacggccaccagggggccgaagggaagggcgggggcggaggctcggagctgacccaccgcctcgccccggaagctccgaggccccgccccggcggccgccagcggagggcgtggcctcgccggcgcccccgccccgcccccgcccccgccgcgcgcgcccccgccgcgcgcgcccccggcccgggccccagtcttgctgagcgcaaggcggtggaggcctgaggcctgaggcctggggcggggtggcggccgggctggccttggcctcgcgccttcccctgcggccgccgcgggctccgcgggcggtatcggagtgtcgtgcggcgcgtggccgcgtgacacgcgcacttgtcggagtgacgggccctgcggaagaggaggtgcggcccagggcgcaggggagccctcgggagcgggcccggccctcagcgccgccccggccgtgtcccggaggagcggcctgcgccgccgcgcgagaggaagtaagcgccccccgccggccccgccgccgccccggccccggcgcctccaacccgcgctgccgccgggcccgaggccgcgccgagccccggagcctgcgctgccagccccacggagcctggggctggcggctttggaactgctcaggaggcggccaggctccctccagggtcgccccgagcggccgagctgtcctttccctgggcttcccggaactgagttccaggagagggggaactccgagatttcccccgggacctgcttaatctttggcattgattggccctcgggtttcacatagcgtttcccgtacc

SEQ ID NO: 45283 - DNA, 1502 bp, Homo sapien
gatgccaggtgcccgcgccctcagggtctcgaggtccgaggcccccgtccccgtgggcaccgaaacgcgagcggccgaaacagcgctgcaggaggctccctggacccccggcggctgcccactcgtccccgctgggcacttcagaggaggccggcgaggccttgctcggggttcctgggacaaccccactctccgcgaagatttctccttctcgtaagacccccgcccccactccagcctcccacggctgcaacccaggccctgcgccacgcgtttcccaaagacgcctccggagggacccgagcttcgggccggcaacaccagggcggcggctcgggagagggctgcggactaagggggcggagggggcggccgaaccagcgccgggctgacgcgccccgcgccccgcgccccgcgcccccggccttccctgcagtgctgagtggtccgtgcgcccgaggtcgggggcggggcggggcggggcggggcagggacggccccgcccaccggcgcttttctcttttttttcactttaaagccgtcggttgctttttctcctccgcacagaagtcgcgctcgggcagcctgcgcgctcgcagcaggaaccaggctccaggcgccggcgccggggccggggccgcggggaggaggcgacttcgctccctgcggcgggcgcggcccgggcgcccgagcctcctcggccttggagagcagcggcggcggcggcaccccgggcgcggtaggcggcgcggggcacctgggaccccgatgggtgggcgaccggcccgggagggggaggcgcggggggccgggcgagggcggacgcggggatcgcgccgctgggggaccgagtgggtggcgcggggccgggcgcgggggagcgggtggagtacgggatggggactcggggcgcggcccctcccgcggtggctccgggggcgcctccctcgccgcggctcctgggagaggggcccaggcccgccccgcgctgccgccgctgcagggcagggggtcccggggcgaggcgcggcgggggtctcggggcgcggggaccgtcgcaacgagttgcggtcccgaggaggggctggggcgctccggggccgccgacccgtcccccctttagcccggggaaagcgggaccccgctcggctgagttagtttcgcttttcccgccagtccgagtcgggattggcggcgcggcccggtcccccgtcggggcgcccccaccctcccgcagcgcctcccccagggagcctgccggggacacccgagcgccgccctccccgccgccccggagccgccgcggcttctcccagcagcggagggagagccggagggttgtcaggaaatcgattaaatcagaaaaacaagggcggcctgggcccgcgggaggaaccgcggatgggtcaccgtccccgggcgtgtactgggctcggtggcgtccaggttccggtgaggacgggacggccccgagaggagggtgcgggtctgcaggaagagcg

SEQ ID NO: 45284 - DNA, 1476 bp, Homo sapien
cgtaatttgtacaccttttgcacacgtaaatatcacaaagtaaacttttaaaataaggcaaggcctagggcctcgcgaggcttctctgaggagcgaggaccagtcagtcacagccagtttccactgcctccacgctccggcctaggccagcccctctccccagtcattcgctcggggctggctccgccccagaactgcgcaacctccccgcccacatccgcgtcctaaccaatgagcgctcgaaatttgggtccacacccccgtcacgccccgccccagactcgcgcgcccgtgacgtcacggtccggcccccgccacgtgacggccgcgcgccgggctctagctccccgccgggctcgcgccgcagaggccggtgaggcgccggcggccacgccgcggaaggcgcgggccgagcagagccgggcgttggagcccgcgcgcgcatggaggcgttgccggcagccccctgagggcagcggggagacaagacccggcgacctcgcgcatccctcgagccgccacgcgctctcgccaccgggcggcgacgggccgcggagccggcgcggccatggcgacgggcggccagcagaaggagaacacgctgcttcacctcttcgccggcgggtgagttcccgggcccagccgcgcgcgccccaccgcctgcggtcccctcggccttcgccccgggcgcggccccagcctcccgcggcggttaccggccttccccgggctacggcgccggcgctcgggaggaggaagtcccggcgtcggggactggtgggcagggccgagggagggggtcgggccttcctcacccctacgtcctgaccgcagccccgagggcggctgtgccccgccgcccgtcctccccgcggcgtccccagcttttccccattctgaagagtcagtggccggtgagtggtgctcggcggcggtccagcctggacgctgtggcgcggccccccctcccccgcccccttctcctggggcctctcccgaagcgcagcgcctcagagcccgtggtaggatcgctgatgctcgggtgtgcccgaggttcctcagggcagcgcgggaggtcatccggacgggcaaaaaggtctgcggacgttggacgtcagcaaggcctgggtggtgctggtgaacggtgatgcttgcggccacacgcggggtggctaagccagggacccgaactcatatgaggtctggaaggtgtgttgagacacttctcgccggctggtagacgcttccaacgccagagaccgcagaattgtaaggtgttccttgttttgaaagctgcattaggtctatggtcaggcaccttttttccagcggagacaatgcatttttaggaggttgagttctgcggttaggaagggagatggtacccctcgccacctccccttgtcacctcccgccgagaatagaaggtaaaatatttttgagtattagtaattttcttttttcctttatcacagc

SEQ ID NO: 45285 - DNA, 929 bp, Homo sapien
cgggcctggcggctggcgcgggaggcagaaggcggggctttcctacagggctccgtgccccgccctccccgcgccgccttccacctccggccgcgcgggggcgctccccggccggctctgtcgcttccgccgccgccccgcccacccgggctcacccctcgtcccgattggctgcgcgacgggagcgcgccgagtcagggggcgggcccgcgcccgctacaaagcggcgaaggtcacggcgcgaggaggcgcgcgtcgccgccccgcgtcccgcctgcggcccgcgcccccggcgtcaccgcctcctgcccgcctgcccgcctgcccgcctgcccgcctacccgcctacccgcctacccgcctacccccctgccggcctgccgtccttccacgcggagagccatggagggagtgagcgcgctgctggcccgctgccccacggccggcctggccggcggcctgggggtcacggcgtgcgccgcggccggcgtgttgctctaccggatcgcgcggaggtgagtgcatggttcggccccacgcggccctctgcgccgcccgccaggcccgcccccgcgccgccccggcccgctgcccccctcggccgggacccgggctgcccgcgggcgcgcggagacccccggcgcgcgccgccgccccccgagaccgggttgagactgcagtcgggaagcggctgcggagtcgagtggagcggcggggactccgggaacgtggggcgcgggcgagagcgccgcgcgggggccacaaacttcctccgggagccgcggggggctggagccggtgcgcacgggccgcccctgccctcagccccgtgctgggccccggtgcacggcgatgctggcgatcgcggctggcggttgctgctcggcatgtgacgtcccgggcgtttttctacacgcctcgcatccgcg

SEQ ID NO: 45286 - DNA, 998 bp, Homo sapien
gtaggcgaactggggagtgtgggcggcgggggaaggcgaggccctggaggacctgttgtttttcctgttgcaagtgaaaaggaaacaaagtgggaagtggagtgtgcgggttggcggcaggcggggcgccccggcgcgccccgcctccctccctcgaggctcactcgcgcccagcgcagtcgctccgagcggccgcgagcagagccgcccagccctgccagctgcgccgggacggtaagcgatcgccgctggctgcgtcaggggaggtgggaagaggaccgcggccaggggctttgggagctgcggctgcgctcgggggcgcggggctggctggcgggcgtctctccggcacacacagcccgtgcgccctggccctgggcgcctccccgagtctagcgagccgggtcctgggagccccgggggccgggctgctgggacctgggcgggggctgccctagaggcccggggccgtcccccgtgggcccgccgagaggggcgtgcgcagctccccggcgcctgcactgcgcgccttgcccgcctggcccggcagcggggtttcagctgcgctcacagcggcggtgcggcctccggtgcgccggctgaggcgcgaggatactggaagcgctcagcgcgtgcgcccgctccgagcgctgactagaggaccaggggcctcctctgtacggcagcggggtccacagagagcgcgctggtgatgtcgcccgagtgccctggcgcggagagagggctgcgcacagttcgccggcgcccgggtcctgtgcgcccttcccagcctgggcaagtggggagcggggctgcagaggggccggggtggaagttttcggggcttcctcccggctcgtggacccgcgccccgcctcccagtcccgggcctcccgcgttgctcgccgcgtttgctgcagcggcgcaggcgagatcagctccggatctgcggccgagccggggttacgccggcaaaaccgcccccagctttgcatttc

SEQ ID NO: 45287 - DNA, 1215 bp, Homo sapien
cgggctggccaattactcgagtgagtctggctccggctctgtgacctgggtccagtaccccgccctttctgcggatgccttgcaaagcggggagcggaaagcagtttggtggacgaccagccctcccttgctttgcaggtggcgctttctatttattgattgtaaggtgaaacctaggccagagccagcgtgcgcgcgccgtcggggtcccgcggctgctctggggctcagggtgcgaaccccaagggccccgcctggcagcgtcctgggcctccgggcgagaacagcgggggtcggggaggatttgcagcgtccactcctctctccgccgcccgtgtgagctcgggcgcttctcccggctgggggtgtgagaatttgccgacggtgcccgcgccgccgccggccccggccccgccccagccccgaggacgccccgcccccagccggcgccccgccccgcctgccagtagtcccagccccgccccgggccgcgcccctccgccgagccccgcttgcctgcacctcgcgcggcgggcctgccctccggcccccgccggccccgcgccgctgcccggaggctggcgtcttcccgtcactccgggacccgcccgctgtgtcccctgggcaactgtctccagggagatcgggccccgcccccggcagcgacacccggtacggagcccacctgtgcgggcgtctgcggggtccccgtgccccgcccccagccccgccgggcgtcccaccccgcccagccccgggctttgtccgcctggggcggggtgggcagggtcggtggaggcgatcaggggtccggggccgtgggggcttggggggccgaggcagggggttgcgttcgcggtgggattctcagctatgggccgcgcgacgctctcctctcctaatctggttgcttccttttgtgccccccgggggtcaggaatcccaggtttctccgctgccgcccttgatgggatccgtgaggcctccagcgggcttcgcacgaggacgcgcctgttcggggcaggctgtttacttgtcggggacccagcagtggctgtgcgcgtcctcccctccccctgccccctattcgggacggagcctcctgcgctctgtccctcccgagctgtgcccttgagcccaagggggctagagggtggcagacccagatcctgaggtcctgcggcttcctccccgggggagcgccttctccctggc

SEQ ID NO: 45288 - DNA, 1901 bp, Homo sapien
cgcggtcgcaaatctcatcgcgatttcacctttgggtgaaaaggtgggagggaagcactaagtttcagcctcggctccactggaaacagacaacgtctgaaggactctgggaggaggcggaaaggggcgaagtcgtggtgtccgcggtgcagcaacacagaatcgggatcttggaaacgggatgcggaggagtgggctcttatgtaagcacacaccaaaactgtgcgtgcaccccccgcctgatgcacatctgagcacacgtacacagagcatctcacccaggggtgcagccccagcctgcgtgcgccgctgagcagggcggactgacccttcggcccgtctgcacgttcccccaaatcagcgcagccaccaccatgggctgcagtgggggcagcccaggctcaggagccccgcccgggacggagcctggcttccccgggacgcctgcagcgcgcgcccacagtctcctgcgccctggccccggctccgcgagcccgacccccaacccgaaccccacgccctgacccggctccctgcgctcggacccgactccccgcatcccggctcgaatcccggcatccggccctactcccgcacccggacccgaatccccgcaccgggacccgaatcctgcacccggacccgaatcccgcaccgacccagcggcccggcccagccccggggcttacctcgcgcggcccagaccccgccgccgcacagcagcccggccagcagcagccgggcggccggggccagcgcgggagcggggcggcgcagcatcgccagcccggggcgggagcggcagggaggcgcgcgggacgccgagcggagctctcggagctctcggggctctaggggcctggggctagctgctccgcggcgcggggagctccgggggtccaaggaggagccgccgccgccgccgccgtgacgctgggccgcgcgctcaggacgcggcgccctccccgcctcagagcagcgtcttgctgaaggcagcggcagcaactaagatggcggcggcgctctctctcgggtccggcgagggtacccggccgggggcggggtggcggcgggaggggcggggatggggagcgacgcgaggcgcgcgcgcggcggaccctgggagcgcgcgggcccgggaggggcgggggagaggagcggagggagcgcgcgcggcggacccggcagcgggcgcgcgcctccgagcccgtcggccccgcctggagcgcgcgcccgcggggacgcgcctggggtgggttccgagcggccgggaggggcccgggggactgtatccctttccctggccgcagatggagagcctcaactccgcgtccctacgcgcgctcccgggctcctaaggccgggtgagcggtacccggggacccgctcctccttctccaccccgaggactcatccttcccacccgctccgccgaggagcgcagaccccggcggagcagtgcggcccaggacccttgtcacttcgggcaggtcgcgtcgccccccagaacctcggggtcctcgtctccccagtagaggtgttgagaggggtcacgaaagggggtccaggagacgaggtcagcgaaacgcgcctggtaaacagttaagggccgcgcagcactacccacaccggctcccgccccgggacctgcccccggggagtctgtcctgaattcactgaaggaatctatttgtgactttcaaaaggcggctggtgtgcgcgctctttctcagtgacatggtgcgatgctggttcttagaaatgcggaggtccgaatggatagagaggacagagaagccctccccctctaccgtggatccctacagggatcttggggtcctcccaatttcccagcgtccagcggccccctcctcctcgcctctggacccctggcacccccc

SEQ ID NO: 45289 - DNA, 1342 bp, Homo sapien
cgccatccaggtgagatatgtgcccccaccaggtaccttccaggaaggctcaccggggaggggtggaatcgggagacgacagttcaatcaaactacagagggaggaagggcggcccagcgtttagtttggggaaatatggagagtaagagtctcagagtgggcgcaggtgagggaagaggcaggggcccagaggtcgggagggcggacgggcgatgacaggcacccggacgcggtgaggtgagcaacaaggtgggcggcgcggacacctgtggaggcgacccccgggcgaagagtcagggaggcgggaggtggtctgcggcgagaggcggccaggcccagaccagggcgccgcgccgctggggcagtcaggggtccgagcggggtcgggggcgctctccgcggcccctccccggcagacaaagggctggccgctcccccaagccccggcgcggcgcggcgcgggcccgggcggtgcaggcgcggcccggcctcggcgcttacctgggccgcccgacccggccgggccggcaggggcagcgggtccggcgcgcagcgcgcggcggcctgttccggggcgtgctcagcccgagcagccgctgcggcggcggcagtagcagcagcaggagcggccgcctcagcctccgcctcccgctccgagagtcaccgcggtggggagggagggaggcgccaggccgccgggggagggaccggcggagggggcggcatctggctccgcgcgggctgctgaggcgcggcggcggcaacgccccggagggaggcgggcgcgtggggccgggcgccggggcggggcctgcgggcggggcggggcccggggccgcgaattggttaactcagcctgtgggcggggctgcgcggtgcggggcggggccttgtggcgcatgtgaacgctcattgggccctcctggaagggggcgagaccagcgacatagggacggggccatgcggtgggcgggtggaacacggcgccggtagtgagtggccgagtccgcgctgagagcaaaggggaggagcgggccgggggtgagcagggaaggcgggttgggcgcgaggaggaggcggtggcctggaggaggagccgggtaaggctgaagctggcgctgcggtaaagccactctgcgtgtccctatctgctccaggagcacagtgttccggaaaaataatggcctctcccacacaccggtctgtgtttaaaaacgggagcaacaagacggggcagaatccttggtgaggccagtttacccagaaccccggaaaattctgaaatggacgaggttgcagaacatttagaggcgtggtcttcctgcgtcgttgagctgggaa

SEQ ID NO: 45290 - DNA, 637 bp, Homo sapien
ggggcactttccccctcgactgcgcctaccgcagcctttctgagtttcttcctagcgaggccgagagggtctttgaggaaaatcccgcatccggacacgccttgagggatggcgtcaaacccagaggcttggaaaaggtaagggcggagagcacgcctcttccttgaaagtgaggagggtttggcccagaaccaacaggactgggtgaagaatcagctccggccaccgcagcaaatcccaccccacgcgggaacttgaagtccggcacgtaggtcccgcggcggccgggctccaacaggccccaattgccaccagaggtagccgtaaacccatggtccccgaaactccttccgggcctacctgacaaaaactgggacaacctccttaggcccccgggattccccctgtgccgcctgaccgcccgccagtcccagagtttagggccaggggccccgcctacctgagggcactggcctggcggaccgcgccgggggagcacttccgctggacgcacgcacttccggccccctggaaccaatgagagtgcgaccgagatgttccactcgctggcgtccgggccgctggtgatctccggtagcactcgggccggcggacagtgagggcgcggtaagctccc

SEQ ID NO: 45291 - DNA, 1276 bp, Homo sapien
cgcgcggtgggcagagccaggagcaccgggctgaggcggccgggagcgcagcggcttctaggggtgagtgggacccacgcggccccacctgctcctcccgcgcgcggccccacccccctgccccgccccgcctggtttataggtcccggcccgagcctccggccgcccgccgggtttgtcccgcgatccccgaccatgcccgccgacctcagcggtacttggaccctgctcagcagcgacaacttcgagggctacatgctggccctaggtaaggcggaggggaggcggcggcggcgcgaggctcgccgtgggtctcgggatcaggcgaaggcggccgggccgggcctgtaggtacgtcctctgtccgtgcctccgccctgctgcgcccaccgtcgcccagtcgcccccgagtccgctggtccttggcgcctccgtccatcgggcgcgggaccccagtccttcagtcccccagtccgtcctttcccgcgcccacccgcccccctgtccccacggccgtctctccacgccctctgttcccccggccgtcggtcccccacccgtccgtccctgagtgcccgcgtccagccccacgtccgtctctacccgcacgcggcacacctgcggagactgcagactcggggtccggccggggaggggggtccggccggggagggggcgcccgggaccgaagcctctgcccggccaccctccccgcagccgccttccgtgcaggccccggggccccgggcgcgctcccgcagcgaagtcccagcagcctcggcgcacccggagcgggtcggggatgcagaatcctggagccagcggacgacccttcaggtccgggcacccgcgggagtgcagagcctggttcggcccggggcgtgccccgaccgccgcctcccacgagggctgggtgcccgcggcgttcttgctcccgggggccccgcgctgtgcttcccgccctcatcgcggtgccaacggtgcgcggactctcaactcactgcaacctccgcctcctcggttcaagcgattctcctgccacagccttccaagtagctgggattacacgcgtgcgccagccaccacgtccggctaattttgtacttttagtagagaaggggtttcactatattggtcaggctggtgtccaactcctgacctcaggtgatccacccgccttggcctcccaaagtgctgggattacaggtgtgagccacgcgccctgccacgagtgtagtttttcttgtagctttaggaatctgggaagttgccgtgc

SEQ ID NO: 45292 - DNA, 650 bp, Homo sapien
ctcaatacggtagatcacgctcccggggtcaaggagacgttttccgttttcttttccctcgcttaggcggcgggcgcgcacagtccagtgggagcgatgaggtgtttctaggcccccaagtcacagaaaagcaggcgattgggaacaacggaggcgcggcgggcccccgggccgcgggccagcgccaccttctggtggatcttccccgacgcgagtctgggagtcgtccctccccttgccagcctacctggctcaggcccgccgcgcccgcagccccagcgcggtcgccgtggcaacgccccgcccagccgccagcctccctttgcccctccccacgtccggcgcggctgcgcgggacggggtgggacggaggcggggagaggacgcaggcgagaggaactcggcggcgcggcgcccgcggcctattggctgccacgtcccggcgccagaagccccgcctccctgacgggggtcacgtgatccctttcaaagatggccgccctgttgttttgatgaataatacttggtggggcgagggggaaagagtaggggtggaggggtaggaggatttactcttccagcgagagctacgcgcatcccatcctccccctcccccctacccgggctccggcgtggaggcggggcgtggc

SEQ ID NO: 45293 - DNA, 1328 bp, Homo sapien
cgcggtctcccaaggagacaagtggaatgcccaccaagtcatgcttttccattactcattccgccttctctcccgaggtggcgcgtgggaggtgttttgctcgggttctgtaagaataggccaggcagcttcccgcgggatgcgctcatcccctctcggggttccgctcccaccgcgccgcgttcggccggttccgcctgcgagatgttttccgacggacaatgattccactctcggcgcctcccatgttgatcccagctcctctgcgggcgtcaggacccctgggccccgccccgctccactcagtcaatcttttgtccccgtataaggcggattatcggggtggctgggggcggctgattccgacgaatgcccttgggggtcacccgggagggaactccgggctccggctttggccagcccgcacccctggttgagccggcccgagggccaccagggggcgctcgatgttcctgcagccccccgcagcagccccactccccggctcaccctacgattggctggccgccccgagctctgtgctgtgattggtcacagcccgtgtccgtcgcgggcgccggggcggatacgaggtgacgcgcagaggcccagctcggggcggtgtcccgcgccggcgactgcgggcggagtttcgcgagggccgaagcggggcagtgtgacggcagcggtcctgggaggcgcccgcgcgcgtcggagcagctccccgtcctccgcagccgtcaccgccggccgtcgccgcgccctggcctcccgcactcgcgcactcctgtccgccgcccaccgcccacctcccacctcgatgcggtgccgggctgctgcgtgatggggctgcggagcggcgccctgcggctcgcggcggccgctgctcgcgctgaggtgcgtcggtgcccggccccccgcgcccccgcgcgccgcggctcctgttgacccggtccgcccgtcggtctgcagcgcggctgaggtaaggcggcggggctggccgcggttggcgccgcggtcgcggggttggggagggggccgcttccgcggggaggagcggccgggccggggtccgggcggggtctgaggggaggtagcgcgggacgggcgccgggtgcgggagcctcgccctcgggggaggggacccctccctaggccagcagcgagtcccgggccggcgtccagcggtcggctggggcccccgcagtgccctgcaccggccctccgtttcccccgcgctgccaggccccggctgtgcccagcgctctccagacccgccgctgcctggccgttccctgggctccgcgcacgttgcagcccggggggcg

SEQ ID NO: 45294 - DNA, 1458 bp, Homo sapien
ctgcttggctactttgcaaatgtctggcttaagatggctggttttttgtatctgcctctgcatttaacctggtccatctcgcgggtcacatagcctctacaaaatgagaaggggttcaataccgttaactccgggcctgggtaaaagactcaagtcctgaccccatcatactccaaccaatacataccccgcctgcgctgtctgcgcctgggtctcttcaaccgcagtgagcggtcgcacggctccacatcagggtcgccctgaggctcagccttccccggccccattccgagtgcgcacaggactgaacgagcacgcccggtccctgctccggagcggaggacacgacgcggacccgcacggtgcaccgcagtgacctgaggaaggagcgacgggcgctcgcgccaaaggcgtccgagtgcctggtaaactgtaaagcgcggtcctgcgtgagttgctatggctacagctgcgccaggcggacggcctgcaggaccgaggtgcagctgggacgagcggaaagctctgcgcgtgggcggggagcccggagcctcgccggggcaatgtcatctaggtgctcggcgctccactgatccggcccccgggggtgggcgggcacgtttgcctcggatggtctaacaggcgtcggggagagccaatggtgtggcttcatggctccacccccttccattcgattggccggcgccgaaaagccgggcgtgagcggccgcagtttctggagggagccgctgcgggtctttccctcactcgtcctccgcgcgtcgccgctcttcggttctgctctgtccgccgccatggcccagtgagtgactcgccaggggcagcccggctcggcctcagcgggcggggaactctttgggggtcgagatctccctcgttctctccgacgcctcccaccctgggggtcgcctgagctcacttggggctctgtgaccctggccctacggcgtctcgggcccagagctccttccctgcgggcccggccccctgccctctcggccgcgcaggcatggggcggggcgggtcccttcgagggccagggaggaggcgcggccaggcctcgccgagtctgcagggacacctgcgggacgcgtgccagcgggagccgggcgcgagggcggggctgggggccgcctgcccggccgaggctctgcagcgtgcgcgcccggcttctgggggcccgcgggaggcgcggaggaaagtgcagactcccagtcacggccaaatgtggaaggaccggacccctgggttgcagcgcgtcgagcggtgctgactctttcctttgttctgtttctgcctctctagagctgacatcgcgctgatcggattggccgtcatgggccagaacttaattctgaacatgaatgaccacggctttgtggtaagcggcgtgggcgcgttgtcttctctctggttcccgggcgctttagccgaggc

SEQ ID NO: 45295 - DNA, 1114 bp, Homo sapien
cacacgtgtttcgcggagagtggtgctcagcgttgtgccaggcgctgaatcaggctctggggtgcagcagtgacctcggtggtcatgtccccgcgtcgcccggccacctccgcagagcaagctgagcagggggctggctggaggccgacggcggaatcccctcaacggagcgccgccagggggcgcgcgaggcagggcggagctgcgtactttgtccgcccgcgcggcccgtcgctcgcgccgcggcgggaaaatccgacctggccgcgcaccaccgccccttctcggccctcctgcgtttgcccagggtcggcccgcagtgatggaggaggaggcggagaccgaggagcagcagcgattctcttaccaacaggtacaggaaaacgggggtcgggctgggctggggcaggacggcgtcgagtttctggacagaaaagtacccggcagcccccggcggcttctcatcggcaccccgcccccgggcgccccccgcggctgcgcatgcgttggcttaactgccgcgggtggtgctgggaggcggtttccgcggcaacgcggctggaccctggcctgcgctggctggggaggaagcggttctaggggagcgtgcgggcgccggggtccggcggcgagaggccaccttctggccttgcgatgaatcctcggtttccccttctcagatggggttttcgtgagggtacaacgtcggcattagacattccaggtgacgcccgtacgcggtgggcggttcgggccggagctctggaacgctggccctggaggcgtcgacccctcgttactgatgcagggacgcggtgcggaccagtcaggcccagagctcgtccttagatgtgggttcgaatctctgccccgccaacttgtgatcgtatcgactcggcccagacgcaattttcttctctgcaaaatcgtcataagaataatcacttgtcagggtagctgcgggcatcccattcgttcctttcatcagcgccgggcatatggggcgtcagaggctgagaacgttgccgtgaagaggcttaaaagcaagacccggagtggcgaccttaaagaggacggactgaagaaacgcgggaatgagctccagacgcgggag

SEQ ID NO: 45296 - DNA, 2076 bp, Homo sapien
cgccagcggctccaggagccaccccgccctggtggcgcgcggtgggggtcccggtggcccccagcgcccgtcccagtcctgagcaatggtcgcggggccgaatcggccgcggggaggggcgccggggcagcggccgggagctgcgccgcattcgcccgggacccctgctcctaggttccctaccccgggacaagagcaccttctgtttccctgaagagacccggcctccctagagcagggccaccgccgccgcctgtgtcctcggccgcggagcaccagaggggtccccgcctctgtcctgagacggactcggggtccggaagcaccggcggggcgcggggctctgcccaggggccgcttcgcgcggggcggcgccgctcccgaggccgaggccgaggccgccgccagggccacccgcgggcgccgctagggcgaggaggctgcagtgggcgcggggccgggggcgcccagggccgccagcgccgccaaggccggggtccgcgcgcccgcgcccgccgcctccgccgccgcctcgggcagcgactcctccgagtcggtgcgcaggtcctcgtcgtcgtcgtcctcgtcgtcgtcctcgtcgtcgtcgtcctcgtcgtcgtcctcgtcctcgtcgtcttcggcctcctcctccggcagctccagctcctcctcctcgtcctcctgcgaggactccccagctgcggcggcggcggcggcggcgccctcgcgcggcccgggggcggcggcgtcgggcgggccggggtcgcccgcgtcgcccagcgccaggcccaggccggcggccgccgactgcaggaagagcagcgagcccggctcggcgcccagcgacagggagccgtccagactgatgggaggcccgggcgcggggccctctgccgcgggctcgccgcgctcctgcttctcgtgcttgcgcttgtgcgagtccatctgcgacatgcccaccaccgtgtggcggcagcccgggaaggtgcagtggaagtgcgagcacttgagcttgtacttgcagtcgggcacggcgcagtcggcgctggagctgaactggcagaagcccgcggcgctgatcacgtcctgtttgccgtggtgcttgcgatgcgccgtgaccttggtgctgtcggtgcagcggaagcggcagcgcaggcagtggaagtgcgtgctggtgcccgagaaggggcagtcggcgaagtggcagctgagtgaggccttgaagcgcttgaagtcgtccagcaccaggttgtccacgcggtcgtggtgctgcgcgtgcttgtacatgtgcgtgcgcccgcagaacttgtagccgcagttctcgcgcgtgcagtggtagtgggtgaccttgagcgagaactgacaagctgcgtccttgcagtcctcgtaaaggtcgaagcgccggaagccctccagcatcatgccctcgtccagcatcttccgggaggacgccgtcttccgccgcttgccgaagggcgacatgtcctcgatgatccagaagcgctttttggcccccgaggctgtcggcatagagatggtgttccctggggaggggcagggaggtcagtgcagaagagggacccacgtgggcaccatcaacagggttacacccacatgggacccctgatctggcatggcgccagagggcggcatttagggagccctcggcttcccctggcttgggaggcctctcctgccccgccccctccctaccctggcacagcaggggtcctgggcttcccctcctcatccctgtctgcagaagggccacacaggcctctcccccggggggtggcagcccaaccagctctgggggacgtggtggctgcttcctggccagtttgggtgggaagtgaggacacgtcctggcgctaattgaagctgaagggggaatctaggtcggcagagtgcaattagccaagttggactcgggccaagacgccagctatagctgcctctaatgagggacaggccggctcctttcccgccggctacccggcttccctggctgcgcctgtctgcacagggggagctgcctactcacagtaggggtgccaagtgccccagggctgtgcg

SEQ ID NO: 45297 - DNA, 2157 bp, Homo sapien
cgttccaagccacactgaggcctccctccaagcctgcagcccccatttccagaccctgccagggcaacctgcatatccacctccctaccctgcccccctcttccaggagtctgccctatgtggagtaagcacgtggttttcctcttcagcaactatttcctttttactcaagcaatggccccatttcccttggggaatccatctctctcgcaggcttagtcccagagcttcaggtggggctgcccacagagctcctcagtctaagccaagtggtgtgtcatagtcccctggccccattaatggattctgggatagacatgaggaccaagccaggtgggatgagtgagtgtggcttctggaggaagtggggacacaggacagcattctttcctgctggacctgaccctgtgtcatgtcaccttgctaccacgagagcatggcctgtctgggaatgcagccagacccaaagaagcaaactgacatggaaggaaagcaaaaccaggccctgaggacatcattttagcccttactccgaaggctgctctactgattggttaatttttgcttagcttggtctggggagttctgacaggcgtgccaccaattcttaccgatttctctccactctagaccctgagaagcccacgcggttcatgctagcaattaacaatcaatctcgccctatgtgttcccattccagcctctaggacacagtggcagccacataattggtatctcttaaggtccagcacgaggtggagcacatggtggagagacagatgcagtgacctggaacccaggagtgagggagccaggactcaggcccaaggctcctgagaggcatctggccctccctgcgctgtgccagcagcttggagaacccacactcaatgaacgcagcactccactacccaggaaatgccttcctgccctctcctcatcccatccctgggcaggggacatgcaactgtctacaaggtgccaagtaccaggacaggaaaggaaagacgccaaaaatccagcgctgccctcagagaagggcaaccacgcagtccccatcttggcaaggaaacacaatttccgagggaatggttttggcctccattctaagtgctggacatggggtggccataatctggagctgatggctcttaaagacctgcatcctcttccctaggtgtccctcgggcacatttagcacaaagataagcacaaaaggtgcatccagcactttgttactattggtggcaggtttatgaatggcaaccaaaggcagtgtacgggtcaagattatcaacagggaagagatagcatttcctgaaggcttcctaggtgccaggcactgttccattcctttgcatgttttgattaatttaatatttaaaataattctaccaggaagctaccattattaccacaacttcacaaatgagaacaccgaggcttagaggggttgggttgcccaaggttacagaggaagaaaacaggggagctggatctgagccaaggcatcaactccaaggtaacccctcagtcacttcactgtgtgtcccctggttactgggacattcttgacaaactcggggcaagccggtgagtcagtgggggaggactttcaggaagaggtgggttcccagttggtgacagaagaggaggctgcaaagtgaaggagcaggggctccaggtctggcgacaaccagggaagggacagggcagggatggcttggaccacgagaggcacctgagtcaggcagtcacatacttcccactggggtctaccatgtgaggcatggtgtgggatcctgggaaggagaccaagcctcatttcagtttgcttatggccaaagacaggacctgtgtacccgacaacccctgggacctttaccaaaaaaagagcaaacaccattcactcactcatgttagataaacactgagtgaagtcactggagcccaaggactgtgcgaggtcagcactgccaatacaagaagctgcagccctccagctcgcctccctcaatggccactccgtgctccagccatgctggcttccttttaggtcctccacctccaggctgtagttcatgtgcttctttctggaatgttcttcccaacctacccactcaaccctcagactttaccataaatgtcatttcctca

SEQ ID NO: 45298 - DNA, 1720 bp, Homo sapien
ccatggcactccagcctaggcaacgagggtgaaccaggtccaggaagaaggtgcaaagacagcattccaggtaaaagaaacagcttgaacaaaaagtgtgtaggggaaccgcaagcggtcttgagtgctgagggtacaatcatccttggggaagtactagaagaaagaatgataaacagaggccagtttgttaaaaacactcaaaattaaagctaggagtttggacttgtggcaggaatgaaatccttagacctgtgctgtccaatatggtagccaccaggcacatgcagccactgagcacttgaaatgtggatagtctgaattgagatgtgccataagtgtaaaatatgcaccaaatttcaaaggctagaaaaaaagaatgtaaaatatcttattattttatattgattacgtgctaaaataaccatatttgggatatactggattttaaaaatatatcactaatttcatctgtttctttttacttttagaaatcacatatgtgacttaaatatttcttttctttttctttcctctcactcagcgtcctgtgattccaaagaaatgagtctctgctgtttttgggcagcagatatcctagaatggactctgacctaagcatcaaaattaatcatcataacgttatcattttatggccccttcttcctatatctggtagcttttaaatgatgaccatgtagataatctttattgtccctctttcagcagacggtattttcttatgctacagtatgactgctaataatacctacacatgttagaaccattctgactcctcaagaatctcatttaactcttattatcagtgaatttatcatcatcccctattttacataaggaaatggggttagaaagaccaaataacattttttcaacatcaaaacactagcttgagatcaagcccagacttggatctgtcgtctgaattccaagctttttgttatttattgatatgttttgttgttttcatgcaataatgcaaatcttagcccaaacattttgttagtagtaccaactgtaagtcaccttatcttcatactttgtctttatgtaaacctaaattagatctgtttttgatactgagggaaaaacaagggaatctaacactaaccagcccgtagtgtgtggtcaacactttcgttactttagtatacatcaccccaattgtttgtcttcaccacacactttggagttaggtagtagtatctatttttacaaataagaaaacccaggcacaaaggggttgattagcaattatcttttgaaaagcctgtagttgctcatctgaagaagtgacggaccacctcttatttagtggacagacagtaactagttgagaagacaggggattttgttggcggaaaaaaaaatttatcaaaagtcgtcttctatcagggagttttatgagaaaccctagctcctcagttccacagtgggtaactgtaattcattctaggtctgcgatatttcctgcctatccattttgttaactcttcaatgcattccacaaatacctaagtattctttaataatggtggtttttttttttttttgcatctatgaagttttttcaaattctttttaagtgacaaaacttgtacatgtgtatcgctcaatatttctagtcgacagcactgctttcgagaatgtaaaccgtgcactcccaggaaaatgcagacacagcacgcctctttgggac

SEQ ID NO: 45299 - DNA, 3965 bp, Homo sapien
gcacaacagtgtgaatctacttaatcccactgaactgtatgctgaaaaatggtttagacggtgaattttaggttatgtatgttttaccacaatttttaaaaagctagtgaaaagctggtaaaaagaaagaaaagaggcttttttaaaaagttaaatatataaaaagagcatcatcagtccaaagtccagcagttgtccctcctggaatccgttggcttgcctccggcatttttggcccttgccttttagggttgccagattaaaagacaggatgcccagctagtttgaattttagataaacaacgaataatttcgtagcataaatatgtcccaagcttagtttgggacatacttatgctaaaaaacattattggttgtttatctgagattcagaattaagcattttatattttatttgctgcctctggccaccctactctcttcctaacactctctccctctcccagttttgtccgccttccctgcctcctcttctgggggagttagatcgagttgtaacaagaacatgccactgtctcgctggctgcagcgtgtggtccccttaccagaggtaaagaagagatggatctccactcatgttgtagacagaatgtttatgtcctctccaaatgcttatgttgaaaccctaacccctaatgtgatggtatgtggagatgggcctttggtaggtaattacggttagatgaggtcatggggtggggccctcattatagatctggtaagaaaagagagcattgtctctgtgtctccctctctctctctctctctctctctcatttctctctatctcatttctctctctctcgctatctcatttttctctctctctctttctctcctctgtcttttcccaccaagtgaggatgcgaagagaaggtggctgtctgcaaaccaggaagagagccctcaccgggaacccgtccagctgccaccttgaacttggacttccaagcctccagaactgtgagggataaatgtatgattttaaagtcgcccagtgtgtggtattttgttttgactaatacaacctgaaaacattttcccctcactccacctgagcaatatctgagtggcttaaggtactcaggacacaacaaaggagaaatgtcccatgcacaaggtgcacccatgcctgggtaaagcagcctggcacagagggaagcacacaggctcagggatctgctattcattctttgtgtgaccctgggcaagccatgaatggagcttcagtcaccccatttgtaatgggatttaattgtgcttgccctgcctccttttgagggctgtagagaaaagatgtcaaagtattttgtaatctggctgggcgtggtggctcatgcctgtaatcctagcactttggtaggctgacgcgagaggactgcttgagcccaagagtttgagatcagcctgggcaatattgtgagattccatctctacaaaaataaaataaaatagccagtcatggtgtcacacacctgtagtcccagctacatgggaggctgaggcgggaggatcacttgagcttgggagatcgaggctgcagtgagctatgattgtaccactgcactccaggctgggcgacagagagagaccctgtctcagaaaaaaaaaaaaaagtactttgtaatctgtaaggtttatttcaacacacacaaaaaaagtgtatatgctccacgatgcctgtgaatatacacacacaccacatcatataccaagcctggctgtgtcttctcacaaatgcactgctaggcaccacccccagttctagaatcacaccagccagttcaccctccagatggttcaccctcaacttcataaaagttccctacctaatctactgacaggctcatccccgacctaattttaaagatttcctaggagctgcagtgggaatcctggacctcagcctggacaaagaacagctgcaggtcattctcatgtgtggacacagaagctctgcctgcctttgctggccagctgggctgagcgggcctgggaattaaggctgcagggttggtcccaggcagtcttgctgaagcttgccacatcccccagcctcctggatttgccaggatccaagagcatggactttaggaattcctggtggaggagtgaagaaaatgtgacagggtgtcctaagccccgatctacaggaagaaaactggaaataagactgaggacttagtttaagatgttcctactcagcctctagcttttgtgctacagttctgggaacagactcctctctcctgaaaaccacttccctccgcagcattagatttcaccaagatgtcttgcttgtgggaaagacttccaaggatgcctggagagaggaggatggaaatgtcctgctctctaaacagatagacagatgcagccagacagaaaatagtttatcttgctgaggtttctaatgtatttgaaagaggcctgggtctagaagtctacccagagggctctgtgttgtgcacgcaaagataagaaccttccctgtgggagttccagagccagttttcataaacacccatcggtgactgtgttcagagtgagttcacaccatcctgacctgccctgagttagaccttacatggtcttcctcctctaggaagcctctgcagcccaggaacctccccttatcggaaatgaacagcatttgaagcttcaccagacagaccagacagcttagccctcgtgttgtgccatgtgggttgttctctgagaggcaggagagcatagtggttactaggaagggaaggactttgggactagactgcctcggctggagtcctctttctgcttcatagccacgtgatcctaggcatgttacctgtgcctcagttttcactctgtcaatatgtaataactgaatctgtctttgtggtgaggattcagtgagttaacatatttgaagtgcttaaaaatgaggcttgtgtccatagattaatgagtgaatacacaaatggtgatatggacatacagtggagtattagtcataaaaaggaaggcagagctgatccatggcaccatgtgacagaacctcaaaagcattaggttaagtggaagaagccagacacaggtcacctattgtgtaattccatttataggaaatatacagaatatgtaaatccgtggagaaagaaagccgatttccaggggctaaggggaggggagaatgggaagtggctgcttcatgggtacaaggtttcattttgagctgatgaaaatgttttggaactacatagagatagtgttggcacaacatggtgaatgtactgaatgccactgattgttcaatttaaaatggtcaaacttatatgaatttcacctccattaaaaaaaaaaaaaaaggaccagatgtggttgctcacacccataatcccaacactttggaaaaaggtgaaagtttttttttctttttttttttatatacttaagttctagggtacatgtgcataatgtgcaggttggatacatagatatgcgtgtgccatgttggtttgctgcacccatcaacttgtcatttacattaggtatttcttctaatgctatccctcccccagccccccacccactgacaggccccagtgtatgatgttctctgccccatgtccaagcgttctcattgttcaattcccacctgtgagtgagaacatgcagtgtttggttttctgtctttgtgatagtttgctcagaatgatggtttccagcttcatccatgtccctgcaaaggacatgaactcatcctttttaatggctgcatagtatcccatggtatatatgtgccacattctcttaatccagtctgtcattgatggacatttgggttggttcaaagtctttgctattgtgaatactgccacaataaacatacatgtgcatgtgtctttatagtagcacgatttataatcctttgggtatataccctaagacctgggacgcattta

SEQ ID NO: 45300 - DNA, 1780 bp, Homo sapien
cgtacataatctcaattctgtgagggcatccgacctgtgggaaaagagctgtttgtttcaaatgccagtcctgcttcctaacaagtgtttagagcttaatcgtgttcaaaatacatatacaatgtttaatacttacaagaatttggtggggaaaatattaccatctttcccttttgtgattggagaaaaatgaggctttgaagggtttaagaacttgcccaaggtcggccaggtgcagtggctcatgtctataatcccaacactttgggaggctgaggtgggaggatcgcttgaggccaggagttcaagaccagcctgagcaacatagtgagactttgtctctataaaaaataaataaataaataaaaacaacttgtccaaggtcagacaggcagcctcttagtaagcacacatatcctctatattatactacctctcatggaggatctcctgtgttctacaaatagtctggacttgagccagaatgtgttataatcctgggatcacggccagtgggcttagaagaagccatctctttctcatgccaagatgaggctcccccagatttgctcagacttacctatagtcagcagcatcgggggtcaggaaagacttcacgaagccataaatgcatccttctcggggcagcacctggctctcccaggtgagagaggactccattttcacaggcaggcgtgggagcttcagcacccatctctgggcccagaatgacccactggagaccttacagctctcctgtcacccccaattcctgccccctctgcagccttggaggagaatggagctgaagggcctgccctctgtagggtgagaaagggaggctaaagcctggtgcccactgccctggctgctccgcattgcaggagctgcgcccttcctttcctggcacagggtccacagccccgaaaccccgttgtgtgggagctgggcacagggcagcaggactaatccttggaacagctcagggaggattatcccagccactgtcagcagcggtgcagctggctcattcccatatagggggaggccagagccaggggcctgccacaagttggaaggctggggaaggggaggccagcagaggtgtcctggctgtgggtggctctgagggggctctcaggggtggggctaaatctcaggggcaggattatgtaaatcaaaccaattctagccacagatttaaagtttggaaaaaaaaaaaaacccagcctggcggaaagaatttaaattataaaaacttagaagtatggaatgtgaaatcatcctgtaggtgcttatttaacaacgaaatcatcccgacacaatgagccatatgtgaaaagtcatccttccccaacacatcccccaacaggcactcctcaagcctctcccacccaagtgctggcatcctccctgtcctgcttcacctgagacaccccttgtctcattagacatgcaactacgggaggggtgacaggaagacaagacactatttcctcaggcccagtttggtgtggggagaaagcctcctgatcctgaaagcaagaatttgaccagagcagaagtaatcagtatgcagattgattctgtggtatgttaatgtttatgcatagattatgaggaccaggtgaaaagtgggccaggggagccagatgtgtgtgtgagtcatgggtggctgagatgaggacaggagggaaactggtttggagggtgctggcgatggggtgggggtgccaggaggaagggaggctagttgtttgaatgtctgcatgaaaaagcg

SEQ ID NO: 45301 - DNA, 2593 bp, Homo sapien
gctgaggacctgcactattaatttgttttttagctaaggcaaagataaatataaaaactgatactccacccagttaccagaaaacatttaggtatgtgtgagacaacttgggtatgtgaacctaccttttcaatgtaaattcagtgaaatctaagtgcagatcccatatttccaataaaaaggtaacatccaaactcagatgtcctatgagtataaaatacacaaagatcttctggacttagtatgaaaagggattttttttttgtcaggtacctcactagttatttttaaaataggattgcatgttgaaatgataatcttttggatatattgggttaaataaatttattattaaagttaatttcacttaaaaatgtttaatgtagctactagaaattttaaaattaagcatgttgctcaccttatgtttctattggacggctctctctagatacaaaggctgccaagagggacctcactctagcttcagggagaagagaggaattagcaaggccaagcagaggctcctgagggcagggccaagggcggcttggtggggtggggatgggatgcacagagataactccaacccttaagaaggtgtttcctagagcaggctgtgacctgtcagtttatatactgaggcttaggagcctcttggatgcccccagatctgcacccctgaattgccctgtgcccctgccgtctttgttcctgtgctggcatagtggtctcacctccggcagtatcaccaccactgggcacaagcttctccagcacagcaactgtgtcttatttctccttgtactcccagtgttcacaccatgctgcactcacagaagactcttcgttgatattttgtggacagagagaatgcctgtgagagtgggctgaagtgtgcgttgggctccagagaccttaaggaggggagaccaggtcctgagtaaagttgaaggggaggggctgagtcctgctagccaggagtctcatcccctggggaagttccagggacccctcagaagtgcaaggggacggtgttagtgttagtccagtaacacagcccagagcctgccttccacgtgggtttgacaggagcctcctaactgctcttctgcttccatttttgccccttcagtctattctcaacagggaagccagaggcatccttaaccatgtcagatcatgtggctcctcagctcaaagcctcatctcagaggaaagctctggtcccttagaaatggcccaagtggtgacagacagactctaaggtgagcagactgttgctagatatctgggctcggaggactcgccactgctcaaaggcagtgaggattttcgcactagaagctggaggacagggatccttgttaggtaggagcagaaagcttagaaaagtggtctcctgcagttacgtggcaaacacatcatgtaagtgataaattgggtatgcagttgaggagatttccaagtaaaatgttgaggatgctgcctggtttcttcttactgcttataatatagtgtgagagaagagagataaattgagaaagagactggtttttaaactgttaaaattgaatcaggacttgatgattttgaaaattgtcagtctccccacatggaaaaagatgctgaaattaacaaatggcttctgagcatgtggcatagggtgtaactgtacagtcttttgtgattatgcataaagatcaaaggatgggagtagcaatgagtcacacagaggtctgttgcaagagattacaagggtgtaccatgcagaacctctccaccaaaccttagggcccttgggaagcttcagtgagttaccctgggggccatcttggcaggagctgaaggtagaaaggtagagtttatctctaaaagattcatgggtatggctcttgacaaatcgactatgagccccaccgaaacccacagaggacaggcaaagggtttgggaaagctgtttcacccacagtgctggcagattggtctgtaggggacagagtgcaaaatgaaagaagactgtcagagaccccaaactctgctgtcaagaagaaggctgataaaactacttggctgcaaacacgtggatctttcgtgagaaaagaaggatgacccagaggcagaagcccagaaggcagagccaagagacatggaatcttcccacatcttaaaacctgtttagggaacaccagcatctgtccagctggatttcagaaccaccattccttcatccttcccctgctgcctctttctgaacagcaatgtctcaagctttacccaccattgtgtgttgcatatgtagggggcagatagcttgtatctttagttttccagatcagaggaacatccaaagaaatctgttctacacctaaacccgatttagatgagattcgggactgtgagcatgaagggatctcaagaggggtgaatgtgttttgcatgcacaagggacaggagtcttggggacagaggacaggctgtggtggcagatactaaggtgacccccacaacccccacctctgccattcacacccttgaataatccccttctctggttgtaagcagaacctgtggcttgcttatgaaggaggcg

SEQ ID NO: 45302 - DNA, 9017 bp, Homo sapien
cgcagccacgctggccctctgctgttcttcgaagccaccagggctgcattggctcccagcctttgctctcactgctttctcctcctagagagcccttcctgcatgtatatgtttgactcactcccttgcctccttcagacttgtacttaaaaatctcagtaagcatttccctggctacccttttaaaaattgcaacccacttccatccccatccccaacatgccatatttcctttcttcttcttccttcttcctttttttttttttttttttgacacaggttctctgtcacccagcctggagtgcagtgacatgatctcggctcactgcaacctctgcctccccaggcaagaaaaggggaggatgccaataaaggatgcattgatttgtatttactacagtggacatcaagggcacattcttgctgtggccatcaagagactgtataaattctatgacttgtagttgtcccacttaagaaacaaagaagctgtgcatttctttactggtctagagctgctctagggcattttctctacagcaattctaggtttccccaccttgtgagtttagctttttctatattcaaagaaaagtcctcagccagagattctcaggagcttatagaacaatccaaactcttgggaatattaagtggagaggggtacgtgcaagacaccaacagcactagaaacagtccacatctttccatgcgtggaggagtttatgctctatgtgagttcactccatcattaattcttcaaacacaagagtgttaaaggaacaagagttaatgggtcctgtcattacacttgttcccaggatgacattcttcatcttcctcttctacaacctgttctatattcccctcatgtttatccagtgcttctgctagtctagttcacttccaaagacccatgattaccatggccctgtcaggctgtaattgctgcaatttccaatttacaattgtcatcatctatggttgataaaggtatagcaatatttctatttcctcatgataatgaaggtcaattacaactgccagtataataacttatttctttgtctgccaacctacatacacaaggaagccaaaatgacagggagctactaaaactttattcttattggaatgcttactatgtacccagaagaagcattctccctactccagcagagcttaatgctgtaggtccaggaagctcaaattctccaagggagttttagtgagaggagccactctcaccctctgcccttggtttacaaacctgtatattctaggacccaatatcttacaatgtccattggttcaaagtataacatgttaaagcacagagccccaactctgaaaagtaccatccctaaattggcatttagttgcacctttatatccacctttaaaagaaatatcttttaatgttctatcagactgatagattctgtttaatatagtatattatagcaccagtggatcatttggttgtatgcatattattgtaccttctctgctacaaaatatattcctttgtcctaaggtgtgttacaaagaacattaggcattctatgcatctttggatagtttaatggccaagacattgatggcaggagagtcaaagccacaggtggaaaacacatttatcccagtaagaacaaattgctattcttccactgtagagagggtaaacaatgtgccattacgttgccaattgaatgcctcaatcatgtcaagggctgaacatctatgactgtttctgaaaggtcaaacattcaacagaggctgtagctagaactgccttaatgataagagatcatgctgaattacccatgcaaaaccttaatacttgacacttatcactactttattcaagagcctattgtgcaagcataagtggctgagtcaggttctcaactctgctcattaatactatgcttggagtatacagtaagataagaaacataaataagaagtgtacatttgtttcttcctgttttcttctggctattggatcaattacatcccatcttaagctgacccctgtgtaattaatcaatatccgttttaagcagcaatccatagttgtgcagaaattagaaaactgacccacacagaaaaactaattgtgagaaccaatattatactaaattcatttgacaattctcagcaaagtgctgggttgatctctatttacgcttttcttaaacacacaaaatacaaaagttaacccatatggaatgcaatggaggaaatcaatgacatatcagatctagaaactaatcaattagcaatcaggaaggagttgtggtaggaagtctgtgctgttgaatgtacactaatcaatgattccttaaattattcacaataaaaaaaaagattagaatagtttttttaaaaaaaaagcccagaaactaatctaagttttgtctggtaataaaggtatattttcaaaagagaggtaaatagatccacatactgtggagggaataaaatactttttgaaaaacaaacaacaagttggatttttagacacatagaaattgaatatgtacatttataaatatttttggattgaactatttcaaaattataccataaaataacttgtaaaaatgtaggcaaaatgtatataattatggcatgaggtatgcaactttaggcaaggaagcaaaagcagaaaccatgaaaaaagtctaaattttaccatattgaatttaaattttcaaaaacaaaaataaagacaaagtgggaaaaatatgtatgcttcatgtgtgacaagccactgatacctattaaatatgaagaatattataaatcatatcaataaccacaacattcaagctgtcagtttgaatagacaatgtaaatgacaaaactacatactcaacaagataacagcaaaccagcttcgacagcacgttaaaggggtcatacaacataatcgagtagaatttatctctgagatgcaagaatggttcaaaatatggaaaccaataaatgtgatatgccacactaacagaataaaaaataaaaatcatattatcatctcaatagatgcagaaaaagcattaacaaaagtaaacattctttcataataagacatcagataaaacaaattaggaatagaaggaatgtaccgcaacacaataaaggccatatataacaagcccacagctaacatcataatagtaaaatcatcacactggtaaaaaaaatgaaagcttttcctctaaggtcagaaataatataaaggttcccactcttgctatttctattccatatcgtactaaaagtcctagccaggacaattagacaaaataaaaataaaaacacccaaattggaaagatagaagcaaacttttctgtttacagataacataatcttatatgtagaaaccccttaaaacttcagcaaaaaaaaaaaaaaaactacagagctagtaaattcagtgaagttgcagaatacaaaatcaacatacaaaaatcagtagtgtctctatacactaataaggacttaacagagaaagaagttaagaaaacaataccactaacaatagaatccaaaaaataaaatacttaggaataaattttaccaaacatctgtacactaaaaactataaaacattgaaaaaagaagttgaataagacacatataaatagaaagctatctcatgttaatagattagaaaaagtaatattgttaagatgtcctcactacttaaagcaatttatagatctaatgcatttattgcaatctcttcaaaatcccaaaggtatttttgacagaaataaaaaaaaaattctaaaatatgcatgaaaccacaaaagactgtgaatagctaaagcaatcttgagcaagatgaacaacactggaagcatcacactaccttatttcaaaatctactacaaagctatagtgatcaaagcaacatgatactgtcataaaaacacacagataaacctatggaatggaataaagagcacagaaataagtccacacatttacattcaattgattttcaacaacaatgtcaagaagacaatggggaaaagacaatctcttcaataaatgatgctggaaaaactatatatccacatgcagaagaatgcagttgaatcctgatttcataccatatgcaaaattcaactggaaatggattaaatacaaatttaaaacatgaaatggtataactattagaacaaaacatagaaaatattcttcctgacattggtttgggccatcatttttctgatatgactctaaaagcacaggcaaaaaaagaaaaaatagacaaatgagactatgccaaattaaaaaatttctaacaacaaaagaaacgatcaatagagtgaaaaagataacctcttgaatgggagaaatatttgcaaactactcatccaaccggggattgatatccagaatatacaagtaacacaaatatgtcaaaagtaaaataaataaataaataaataaataaataaattaaataaattatttaaaaatcggcagaggacaggaatagacatttctcaggagacaacatacaaagggccacagatacatcaaaaaatgctcaacatcactatttgtcagggaagtactaattaaaaccaaaatgagatgtcccctcaaacctgttagaatggctattatcaaaaagatgaaagatagcaactatcagagaggatgatagaaaagggaacccttgcatcatgtacaaattaaaaatagaactatcacatgatccaagaatcctacttctgggtatatagccaaaggaattgaaatcaatatgtcaaagggatatctgcactcctatgttattgcagcatgttcacaatggccaagatatagaatcaacctaactgttcatagacagatgaatggataaatgaaatgtgatatggaaaattattcagccttaaaaacagtaggaaattctgtcatttgagacaacgtggatgaacctagaggacattaagctaagtgaaataagctagacacagaaagacaaatattgcatgatctcacttagaatctaaaaaatctgaactcatagaagcagagaatagtatgatggttactagggttatctggcagggagaggatgaggaaatgggacattgttaataaaaggaaaaaaattcaattagtaggattacattcaggggacccaatatacgacatgttgactgtaattaataatgtattgtatgcttgaaaattgctaatacagtatattgtaaatgttaatatgaggtaatatatgtgttaattaacttgatttattcattcaacaacatacacatatattaaaacatcacactgtattccacaaatatatataatttttgtcaattaaaaaataatttttaaaaatgagaaacaaaaaagctgacattttcagattaaaaaaattatacagaagaattaattcattaaagtaaaaacaaatgtgggaaaatggtttttaaatataatttaaaccaaatttaaaataagcatataaagactatggacaaaacaagaaatccaaataaaaaataaacatatgaagaatattcaaactcactttttatcaaagaaatgtaaattttaaaatatagcattgctattgtgttttcataaataataatatatcatggatgagcctgtgaggaaacagacactcatactctgcaaagcaatgactaagataattatgtcagatcatgaattacgttaattagcttgatggtggtcactgtttcacgataaatatacatatgtatcaaaacatcacattacacaccataaagatatataacttgttatcaaaaagaaatatagcagttaaaatttaaaatttttaaaaaacgtctttttgaggttcgtacctcacttaagtcacactgttcaaaatattcatgcactcatttctctcattcatgtgttaatgtacagggtacgggccactataaattccttcagcaactggaaaggaaactttatgtactgagtgctcagagttgtattaacttttttttttttttgagcagcagcaagatttattgtgaagagtgaaagaacaaagcttccacagtgtggaaggggacccgagcggtttgcccagttgtattaacttctaattcaacactttaagattcttagcattattgcagacaacatcagcttcacaagtgtgtgtcctgtgcagttgaacaagatcccacacttaaaaggatcctacactttttttaatgctctgctgtttctgccttgaaattcttaacaatttttttaaccaaagtcctcacaaattcagtttacattagccctgcaatcatgtagacatcctgattccagacaatgtgtctggaggcagggtttacaggacttcaagaaccttaccttctcaactttcatctgcatctttactcccaactatatatgaagatgatgaagatagatatggatggtgcttctaccataccctcttcctctgccaaacttccttgatctaggataaggtcagtaaacttcttccgtaaaaggccaaaagtaaatattataggctctacaggccctagagtgtctgtcataactactcaactcttattgtagcataaaaactgtcaacagacaatacagaaacaaatgagtgtgactgggttccagtgaaactttatttacaaaagatttgtcccatgagtcaaatttaccacctccagatctagagaaacagttttgagcccttttattttgctcaacagttaagcatggctccatgtcccttatatttagtcagaactcggtatgttttaaggaaagaatggttacacgaagacatacattcattcatttatacaacacattttcagtgttgaatgataaattttggaatagttaacagatgataaaagtgttgttttcagtcatccctatccaatgaagtaaaaaaaaaagtgttgaatgggaagaaatcaagaatagttatacgaatatcaccattgcattaaagctctcttccttgtttctaaaagaatatcttgacacacattaagctcactgacccccacaccatgaatgagggcatcttcaacaatggtggatgacgtcttagtttccctcaactcagttaatctaagtaagctcatggtatcactttcctgtcctagagggaacatatttcctgcatttttctttttttccttactttccatcaccaagtaactcttctgatattttttctcttgagaaaattaatatgactcatagatctggttcccaagagaaatcaatggaggcctggttacaaggatctaagaagcatcaatgggtcactaacatctagtggtactaattaactctgttaatcattgggaagaaaatgtatatatacttttgtcttggagctgattctactagaaagcagaaatcaaaatgatcagtttcccagtgtcactactgcacaccctggaacagaacaggtaggtcagaaaaacgctcccaaagtttagcaatgtcaaggcaatctctctcttcttacatttcccttcaaccttctatctcctccacttttctgttttcctcctatctccaattatttcaatcctcagagcattattcttacaatcttaatcactaaattatattacacccgttaaaggagagatttctaaatgcattgacatttgtactgtctctctttggagaattagtattataaggatctgttatctcttgtcaccttccttatgtcatatgatatgtcacatttcccactgcggagaccaaacatgttcacatcgtgtgcgttccattttcctaatggaaagtggggggaagtgattttctgtcctcatatagagaatgctggggccattccctctgtatgccatatttgataaagcatttgataatcttagtcaatgcctgggccaagaattaaaggggtaattatcagaatgaaaatggtttaatgaaactgtgtctatcagttctgaaaagggcctctatcacaatgaactaaggtagttatgaatagagctaaaacttaggcaacaccatcctggacataggaacgggcaaagatttcatgacaaagacacggaaaccaatcacaacaaaagcaaaaattgagaagtggaatctaataaaacaatagcttctgcacagcaaaagaagctaccaacaaagtaaacagacaacctacagaatgggagaaaatatttgccaactgtaagtctgacaaaaatctaatatctggcagctataaggaacttaaatttacaagacaaaaacaaccccattaaaaagtgggcaaagaacatgaatagacactctcaaaagaagatatacatatggttaacaagcatatgaaaaaaaagctcaatatactgagcattagagaaatgcaaatcaaaaccatattgagatatcatctcataccaggcagaatggctattattaaaaagtcaaaaataacagatatcggtgaggttacagagaaaagggaacacttatacactgttggtgggactgtaaattatttcaaccattgtggaaagcagtatgggatggcgattcctcaaaaagccaaaaacagaactatcattcaacccagcaattccattactgggtatatacccagaagaatataaatcgttctaccataaagacgcatgcatgagaatgttcattgcagcactactcacaatagcagagacatggaatcaacttaaatgcccatcagtaacagactggataaagaaagtgtggtacagatacaccgtggattactatgcagccataaaaaagaacaagatcatgtctttgacaggaacatggatggagctggaggctactatccttagcaagctaaggcaggaacagaaatccaaataccgcatgttctcacttatgagcgtgagataaatgatgagaacttgtaaacacaaagaaggaaacaacaggcagtggggtctacttgaggacgacgggaagagggagaggagcagaaaagataactactgactac

SEQ ID NO: 45303 - DNA, 2107 bp, Homo sapien
cgtgtacccccgaacctaaaataaaagtcaaaaagaaaaagaaaaaaagaaaaatccatgcatatgatacatcagttaacaaggcactggtgaaattaattttaagtattattgtctctttgtgtttttggtctcagaaaagttacgatttcccttagttccttagggcagagagaatcttcaatcactgaagtcaggagacacacattctatctgattttctacattatctgtttgaaaaggttacccacttattagtgttaaagccaagatatccagcaaggatagcaaccaactcttaaggtactctcccttaggaggattcctgattctttaatgttttctaaaaaagcaaaacaaacaaacaaacaaaacaaaacactaaatgttttctctttcaacttatttgaatacactcttttctcactgctctgagcatgaattcaatatttcagggcaaactaactgaatgttagaaccaactcctgataagtcttgaacaaaagataggatcctctataaacaggttaatcgccacgacatagtagtatttagagttactagtaagcctgatgccactacacaattctagcttttctctttaggatgattgtttcattcagtcttatctcttttagaaaacataggaaaaaattatttaataataaaatttaattggcaaaatgaaggtatggcttataagagtgttttcctattgttttcagtgtaggactcactgttctaaataactgggacacccaaggattctgtaaaatgccatccagttatcatttatattccctaactcaaaattcattcacatgtattcatttttttctaaacaaattagcatgtagaattctggttaaaatttggcatagaacacccgggtattttttcataatgcacccaataactgtcattcactaattgagaatggtgatttaacaaaggataataaagttatgaaaccaatgccacaaaacatctgtctctaactggtgtgtgtgtgtgtgtgtgtgtgtgtgtgtgtaagagggagagagagaaaatttcactccctccataaatctcacagtattcttttctttttcctttcctttccttgctcttctttctctcctattgctttcctttcatttccttctcataaaagaaaaataacaatatagaaaataacaaaatatagatggtcaacctttttaatattaaggttacctaaaatgccattatccaaagtggttctctagagatgctgatgtatatacttacatattttacagtgtattcaaataaagagtatattacataagacatatccttttgtaaccaacttttgtcattaacaatttactggacttgtcaacaaacctaaatctgtatcgtctataatggctacgttcattttggtatgaatcttaattacccctttctgcattatttaatgattttctcatatgtcactcttaaatgtacttctaatttttcactttacatcacataatgaatggatccaaatatgttatggatagatatcttcaaactttctacttacaagtagtgataataacagatgttctctctaaagtgtagttggtatcaattttactgacctttaaaaatatcttaatgggacaaagttcaaatatttgatgaccagctatcgtgacctttatctctgtggctctgtgggcctgtagtttttacgtgcttttagtgtatcatgattaaatattttgttttagtaaagacaccattatttcccaacttcatattcaaattgtcaaaggtattaatcctagagcagaactctcaaaagcaccaactctgattcctaacaaagcatggaaaagccctctctctgagtttcagatactcttttttgtgggggttgagtttcactttatttaaagtgagtcttaatcctccaacaagtcaacaagtgattggctggaatcacacgtattggaaaaccagcggaagagtaagtctttgtattttatgctactgtacctctgggattaattgctctttccctcattggccagtcactcttagtgtgtgattaatgcctgagactgtgtgaagtaagagatggatcagaggc

SEQ ID NO: 45304 - DNA, 9889 bp, Homo sapien
catggtaaagaagcactccgttagggaaattatattctttgcccctctaatccttcactccacctgccatattcccacatgatttttttctttgctgttcttgtctaattgttattaataattaataaataacttatgatctaattgttattaataataacttatcatcacatgatttattaataaattaataaataacttattatcaccgcatttccccaattcatttatctttctttcattttctctctttgtgtgttttctgtcttcatatttcagcacttgccacatatttcccacaaaatcatttatggtcaaacaacacttcaacgtgtagcatttgtatttctcaattcttcctcactttcttccttcagaatactaaagcttcttctctactgactgagtcaatggccaatggatagagtaaataattctgcggtatctaaatttgtattgattggactttcaagctcttgggagatgcatctttttcttttttggttcttctctgtgttctacatgggaattatcctggaaaatctcttcattgtgttcacagtaattattgactctcatttaaattccccaggtactgcctactggccaacatttatcttcttgatctgggtcttctcctacagttctgactttttcactaactgcagcatcatttcttttccaagatgcatcatacagatatttttcatttgtgtcatgcgtaaaaattgagatggtgctgctcataaccatggcatagagcaggtacactgccaatctgtaagcctccccattacctgaccacaatgaaccccaaaatgtgtgtttcctttgttggaggcatcctggatagtcaggataatccatgctgtatctcagtttgtttttgccataaacttgcctttttgtggccctaatagagtaggtagttttcactgtgattttccttatgtcatgaaacttgcttgtgtagacacttacaaactagaggttgtagtcactgctaacagtgggcttatatccatagctacctgtttcttattaataatatcctatattttcatttcggtaaccgtctagaatccttcttcaggagacttatctaaagcatttgtgtcatgttagatcacatcacagtagggattttgttttttatgccatgtatatttctgtatgtgtagcctttgcctaaaacaacacatgattaatatttgttcattgttccttttgctatcacccctgtctaggatctacacattaagaaacaaagacatgaacgtctccatggaaagactgggaaaatggattgcaggttctagcaggatgtcataataaatggtgcatatccagagtgcaagatgattcagtctcaccaagaacactgaaagtcacatggctaccagcattattgtgataagaactactattttgggagatagtttagcaaaggtgccatgtagaaattgattaagtcagaggtatctttaacttgccaccacagagaagagattaatttcatatacttccattgagaagagagataagaatacaaaaccaagctgatttgcaggagtaaacttgatattcaaatactatttcctgaatgacattttctgagacatgctaattgtaattactttcagcttcaaaacataataaatttatctcatagtaagcatatagatggaataaataaaatgtgaacttaggtaaattataaattaataaagtatatttttaaaatttccattttaatttctgtttaaattagaataagaaacaaaaacaactatgtaatacgtgtgcaaagccctgaactgagatttgactttaccttgagctttgtcagtttacgatgctatttcagttttgtgctcagatttgagtgattgcaggaagagaataaatttctttaatgctgtcaagactttaaatagatacagacagagcattttcactttttcctacatctctattattctaaaaatgagaacattccaaaagtcaaccatccaagtttattctaaatagatgtgtagaaataacagttgtttcacaggagactaatcgcccaaggatatgtgtttagaggtactggtttcttaaataaggttttctagtcaggcaaaagattccctggagcttatgcatctgtggttgatattttgggataagaataaagctagaaatggtgaggcatattcaatttcattgaagatttctgcattcaaaataaaaactctattgaagttacacatacttttttcatgtatttgtttctactgctttgtaaattataacagctcaattaagagaaaccgtacctatgctattttgtcctgtgattctccaagaaccttcctaagttattctacttaattgctttatcactcatatgaatgggaatttcttctcttaattgctgctaatctcccccatcttcaaatactctaccgggcttctggaacaccacagcttcctggctttttctcctacctcctgggcaagtccttccctgtgtcttttgttgagtgttcctcatctgcttaactaccaatcaacctattgcccctaatttgatctttggcctgttttcacttagattctatccctacgtatcacccattcccacagctttaatcaccatctaaacactaggggctctcaaaccttgtatttttctttctttctttctttctttctttctttctttctttctttctttctttctttctttcttcctccttttctttccttttctttctttcattctttctttcttttttaaggggcagggtctcactatgttgctgaggctggtctcaaactcctgacctcaagcaatctgtctgcttcagcctcccaagtagctgagaatacagggacaagccattgcacctgaccctggtactatttcttgagttcctgatccacagatctaacctcctactttcctggatgccacacaagatcttccactcaacaagtctgcaactaaactagccttcctcttttcaaacctactcttctttcagtgttctcagtcacaataatttgtaccaactagttacctagttgcacaacccaaaatctgggaaaaataatagatttctttctccatagtacccccaaatcaataaatcatcaagtcttattctaccttccaaagagccttacatatgttcctttattttcatctgtaacaccactattcctgtctaagcctacctatgtcatttttggaagagaatatagtcacctatgcgaccttcccacttaaaatcctactatttacgcttcagtaaaagaaaaaaaatttttaatctaagtatgtaattcttttgctgaagacacttcacttgcttctgtgcccttaaactggtatgttatcatggtatagtaggccatccaagacctggcttccttcctttttttcagtctcagagaataacatactctttccctgcaactccagatccaatttggttttcttttacttgcctggaaactccaaaatctatcaactctggggctttccactagctaatcattttgtatacaatatttgtccttcatgttttgcctcttaacatctcagctttcagtttcatcattttaccagggaggcctcccagaacctgagtccagaagagttccttccattgtatattcctctagcactacctattacctcttttgtaagactaacagccctcaaaatttttcattcagtgatgtcttcctcattgcattttaagttcaacatgagcaggactttgtcgtgttcacctctatcacatcataaatatagcaaacagtaaaactattgcaacatgactaatgtattgaacgatgcttcagctttcttcttacgttcaatcacaggtcatatgactaaagaacttcctttttaatctccttttctattctcaattaatttcttctgcctgcatcacctcaagtctctggggtgaaatccactaatgaattccttttgcagcttaagccaattccaatcttgagccaatctcaggtgaagaagcctgtaaattatcactctcagtcctctcttgtactactaggtctcatgaactcttcattaacaactccagcttctctgttagcccaaaagccttttgctgcctagaaaacccatgattcatgcctcaggaaacagccttcaaatcacaacatgttctgtatctggctggccaactccctgcaacttatttctgcctagattctccctcattcatttcaatacgctgttcggcctgctaccccagtttcccacttagaacaatggcacacaggacaggagcacattggcacatcagaatgacttatgtactgctcattgtgttgcagaagagacctctgtgggggcaatagaacagattttcctctcacgtcactgtagttgtggtttccctaagcacctacactgtttcacctcatcttaggtagacaataatccatgtaactgactgtgtatcctaattttaaaaaatatttctgcccacattattctgcagtttttatcttgcttacgtatttttggaatgttactatttttcaaaaattaatttgggatcaaccaacacttcttattctgctgctgttctagagaaaatcattttcctcatttctgaacaagagaaaatgaaatacagctctaaacaaatgccactgtaaaccaaggtggagcctttgcactttcaggccaccatgataacctggagattagatttttctgtgtctttatatcaataataaagccaagcttctccaggggtatccactaggcttgtctcaatggctcaatacaggtccttttgtgaatgattacctcaccctcatggaaacacactcttgttacagaaactcagaatgattctattttttcttttatatttgtatatgtttttccaatacctctgaaaaaactgatccaaaaaaaatacaaattttaattgtagccagtcaattcaggaaggataaaggtcaaaaactttcaaagaaaccttcagccccaacacactaaactttgggagcacaggttggcatccagaggtaaacatttgctataactgataacaggagaaggatccatttattcacctgttatcaattacaggcattgtatttaaagatcagatgttttatatttatttcttcaaatttcattcatggtgccataagtgaaggtatctctgtccaccctgaatatattttcactccctcatctcagtcattccgaacaattcacacactaagattacccatgctaaatggggattcttttttactagccaatgtagtacctcaaatccttccttccctccccctatttcatcagcaggcaattcttttgatacttttgtcaaggggaaattgtgtgactcagagatctagtccccaagagaaactaataatgggctgggtattgtctgtctcagcagcatcagtgggtccctctcctgtgcagctaattagcttcctttccaatatgaagaatcttatatatagctttgtctttggggtattacataaatgaagattaagctatctgaatttctccttctcctaaaaatgcacatcctatgactgaaaagacaggtaaaagagatgcttttaattacaaaactttccctgtcgtggttgcttctctctatccttctaaactccctttcaatttcttctcttctgtaacatatttgtgcccaaaatcttctgctttctgaaatattttatctttttcttccacactatctcttattttccaattttaatcattaaattatattatgtcttataaaactaatcccacatataaacccctatgataatttcagtttgtccctagtatgaagttctttaaagatgtgtagttttctaactttcatgctctccaattaattataaacttcattttccactctgaaaaggagatgtctgatctcagctatttccatcctatttgaaaaccagatttagttttaaaccagaggaagggaatctcaagtctttacctcccacagtctggtgtgattctctctcttttggtattaccttcctccacattggaacactccagccaatgcataggctgagaggctatctcagattcagaaagatttggcctcatcccaggggagggtacagaggagctgatgactatgaattctgaaatggaactgttccaggttgaagaaataagaaagggaattgggaagagcaatgcccagtgaaaaagaagaaataatattttaggaagtgaatgctaattttattttaaacaaaataagaactcaaggaataagagggttcttccaataggttagagtgatcctgtcaaacatatatgcttctagatttttttaaagactgtttctactaagaaagcatagaccgctattgagaaagatcattaaactggaatttaggaggtctgccttctgattctgacttcttgaatgtattgttagccatttaaccacactgtgttgtttctcattctacctgtagaatctcaaagttctttcccacttctatacaaaactataattctgaacatcctttttgtttaatataagtctgcatttcctgtttgaagatatgtgtcccagaccctaaatgactgacaaattttaaatctccaataggaaagatgacaaactctatggaaacttggcttctgaagaactcctagaagctttccaaagtcatcagtgtttcctaagaaggcagagaaatcaaacacatggtcttttcctccagacaagctcctttgggtcatcaggatttcttcaacaataaaatgtaataattccaaatgtttgtaacagaatgggtaggactttcttcacttatttaaatactcccttttttatgcaactgagttttcatcaacaagtacaagcttgtgaaggagtactttaaaatgcaatttctctctatttttgtgggggctaatattttatttctcatattgacaatttattatgctgtttttaaaaagttcattcatcaagtatttcttgagctttttctatgagacaggcactgttttaggcaagtaattatgcactgaacaatgcaaaaagtttccctgcactcatggactttaattttacatttatgaaaagctacaaatattagaataagtaaaatactgcctggaggctaaagcatattttgatcacttattccctaattcttttagaagagaactcacctgtcggttagctgaaccactgccagtgatatccaactatacattcaatcccaccatacctcattatcacacctattcactcacaagcttaaactcttaacttttctccacatatcagtgactatttcctacagcttttcttttactttccatgtttgcagtgacaatatacataaacagtgtatgaaaactcaagtaaaatctactctctcaggtgttcataatgtatcaatgtatattgctttaagcctgaaggtaacctaagtaaagatgtaccatgttccaccaatgcttcttttgatcatcattttatcctgttttttctttaggattctttcttattccttcccctgacccttcttttattctccaaatttctttccaattcatctttgttcttccctttcctttttactctctttaaacattctatggactctgcctccttcacactgatattgaacgcccatagtttcatattttggattgcgattgttttattttaaaatggcaaatgttcatgttataaagagaatttttcagtctttagactaataggttcatgtagtttgggattttcctctttaagaaaattaattatcactcacactccaagacaaacaccatttcagtagcaatatgaatttcagtagtaataggaatctccaaatatgacaaagtaattcagacattaattgcttttgttttggaattgctcttataagatgaaatatcactttcatgatgagagtcctagagtgcttggtttatatattgtatcttagttttaacaggataaaacacttgatcctaagcagtaaacatgattcttcagcttcaacttcatttctttataaataactatttatgaattggtgttgagcttagtaagtcaccaaacaccttctgctcagcagcataaaggacatttccatgaaacctcccagggataatcttatttactctataatgtttcccgggttcaattcctctcccaaaattctttgttcttaagcccctatgatctgggtgatctaaatatgggtaagaagtccagggatagcactatgaatgaagtgaaaatagtaaaacatagttaaaaatgtacagatgctctctgacttataatagggttacgtcctgataaatccatcataagtcaaaaatgcatttaatattcctaatgtacctcacatcatagtttggcctagcctaccttaaatgtgctcagaacactttcattagcttatataagatcacctaatacaaagcctattttataataaaatattgaatagctcacgtaatatactgactactatactcaagtacagtttcttctgaatgcatgtcactttctcaccattgtaaagtcaaacaattataagtcaaactatcacaagccagggaccatccatatgtatttcattcagaaaatgctggaaagagcatttcggagaatatctagatgagagaaggtagaaagccatgcacaaattcactgagagtttaaaaaaatacatgcatattgtggagatagaaatcaaatctatttgtctccatctgctgtattcttcccaaaatattatctcttcttatcccattgtactatattgcatttctttgaccatttattgtgtatctcttaatatttcccacttcatcattactaacctcactcactctgaacttgatgagagcacctgagcattaatttttcttataattatttaatgattaccagaattcgttcagtatggccagctctggtcaaagtgaggcaggcaagatgctttgtcaactgcctggatggaatgtctcaaaaggtttccatttcatggtagcattatgcaaagttcaagacgtttaatcaagacccttcacttacttaactatacctccttgagaatcccatctatgaaaaaattctagtcattataaaaatgattgattaaatgagggaagtagtagagttcttcatttctttagttggtttagtctcctatgagtcaatcctattttcaaaattcttaataaaccatttattccttcaactttctatgccatttgatgttttgtaaaaaaaaaaatataatatgtatacaaaaagatatttcaaaatctagaaagagagctttagagctttgtaaagctcttttaaaaatcaaaaacaactactgttaattaacatgttgtactatgcaatttgtttaccattattactcttggtatttttaagaaaagtctttccattgttattataaatgcttctattgatatttattttaataactgttattacagtccgtcatgtacatacactatacttaaacctaatgtttggtatttaaatcgtttcaagattttatcactgtcaacaaagtatgatgaatatttttatgctgaaaacttctgtaaaaatagaattccaagagtattattgcaccaaaaggcatggacttaaaattcttgatacatgatttcaaaatattttctttaaggtttgaatcagtctatattccctccagcagcgtataaaagtgccaatttctctgatccttagccagtttgggtaataataattgtaaaacttttttttctttttttttgagacagagtctccctctgtcgccaggctgaagtgcagtggcg

SEQ ID NO: 45305 - DNA, 8649 bp, Homo sapien
cggggtcaagctattctcctgcctcagcctcccaagtagctgggactacaggcatgcaccaccatgcccagctaatttttgttatttttagtagagatggagtttccccatgttggacaggatggtctcgatctcttgacctcgtgatccaccctcctcggcctcccaaagtgctgggataacaggcgtgaacaaccatgcccggcctgtaaaactttttcctaatttaacagaaaaataatagtattatattttatcatatttctttgatttctaagacacacatacacacacacacacacatatctgtatatacaaatacacgtatagcttacattttaattcttcatttcatttgttcatttattaggtcttggagattttgtgaaactgtttaaattcttttttatactatgaagatatcaaccttttgtctctacagcatttcaaattcaagtatgattcacgtgttggtttggggtagatcattataggcacatgtaggaaacagctttcagagatgccttaaccgtaattatgcatttgtattctaatttttatttaatgttattattgattgcatttttaaagattctgtattttttaaaccatttatttgtatatgttggtatacaatcttgccattttctgggatttcatatttccttatttttgttttttaccttttttggcttgaattttttgagtttttatgcattcttttccagtttcttaagatgctaataagttcatgtatttgagcaattgagaacatttaaagcaatagactgcctctgagcacagctttgtccatattacattaaccttttataccctgggttcccactagtttttaaataatctactatcaaataaaagatttgttaataataaattttaaatcattaacacttaacgcattattttcagtcacactaagttgattccttcgtttctttcaggttgcttcagagtcttcccttctatctgattcagtggaccaagtaaatgactctctggtaacagaatttgtattacttggacttgcacaatccttggaaatgcagtttttcctttttctcttcttctctttattctatgtgggaattatcctgggaaaactcttcattgtgttcacagtgatctttgatcctcacttacactcccccatgtatattctgctggccaacctatcgctcattgacttgagcctttcatctaccacagttcctaggttgatctacgatctttttactgattgtaaagttatttccttccataattgcatgatacaaaagttctttatccatgttatgggaggagttgaaatggtgctgctgatagtcatggcatatgataggtacactgcgatctgcaagcctctccactatccaactattatgaatcccaaaatgtgcatgtttttggtagcagcagcttgggtcattggggtgattcatgctatgtctcagtttgtttttgtcataaatttacccttctgtggccctaataatgtggggagcttttattgtgattttcctcgggttattaaacttgcatgcatggacacttatgggctagaatttgtggtcactgccaacagtggattcatatcgatgggcaccttctttttcttaattgtatcatacatttttattctggtcactgtccaacgacattcctcaaatgatttatccaaagcattcttcacttcgtcggctcacatcaccgtagtggttttgttttttgctccatgcatgtttctctacgtgtggcctttccctactaagtcattggataaattttttgccatcatgaactttgttgtcacccctgtcgtaaatcctgccatctatactttaaggaacaaagatatgaagtttgcaatgagaaggctgaatcaacatattttaaattctatggagacgacataacacatttggttgatgagagcacaggataaatgccatggaccatcaagactcctgtgatcaccatgatcactatggaacgcgcacatttttagtattgcctgaaaaaactgaaaaatctgcaaaaaggatgcattaaatctaagaattgtatttcagataaagttgcaacattttttgttaatcataaaaagtatatatttctatctaatgtgtgtatctaattaacagcaatgactacctttaattttgatgtagttattttatatctgtatataagcacatacacatatatatgacctaggtttatttatcagtatttttatgctgataataagcatcactggaaattaattttcttatggaaattatgtggatccaatggataaaatatgagtttatataaattagtaaatgccaaaatcaaggaagaaacaatttttattttaattgtactttaagttagataaatggtaaggtcaacagcttgttacaacccttaagtattattttcaggctgattgtcaatatgttttgtacaatgttctcacttataggtgggaattgaacaatgagaacacatggacacaggaaggggaacatcacacaccggggcctgttgtggggtggggggaagggggagggatagcattaggagatataactagtgttaaatgacgagttaatgggtgcagcacacccacatggcacatgtatacatatgtaactaacctgcacattgtgcacatgtaccctagaacttaaagtataataaaaaaaaatagactctagtactctgtattatgcaaaatttgtctatgttacacttttttaacaacacaatcctattgcccttgaaatcttcttcaaagcatttctcgagtcactcttaaaaagcatctacaacctaaaagtataggaagagatttatttcctggagaagagaccccattgagatcttaaaagcacatttaatgtgcctgtgcttaacttaaggtgcttaggacaaagaaggcgattgacatctttcaggtaaaacctggtaagtttggtggtcaaggaacacaactgagacatcacttggatgtattcctatgactattttaagaaacataaattgtggtgactcactcagctcacttttaactactgcatggtaattaaagatgcaaaataaaataagttacaagaagtgaggttttttattggttaaagcaatttttctatattttctccgcaagttggtcataaaagttctaagcattcctctttttataaaatcgaagcattattacttactctcttgttaacctatctggattttaattttgtaactttattatatttgttttgctgtgattctttaaaaagcacctttagactcagtgagatagcaaaaatatccaaataggccaaaaaattgtggcaatgtcctctcactcaggaaaattctgtgtgttttctctaatggccaagggaaaacttgtgagactataaaagttagtctcagtacacaaagctcagactggctattcccagatctcttcaggtacatctagtccattcataaagggcttttaattaaccaagtggtttactaaaaaggacaattcactacatattattctcttacagtttttatgcctcattctgtgaaaattgctgtagtctcttccagttatgaagaaggtaggtggaaacaaagacaaaacacatatattagaagaatgaatgaaattgtagcattttattgacaatgagatggttctattagtaggaatctattctgcataattccattttgtgtttaccttctggaaaaatgaaaggattctgtatggttaacttaaatacttagagaaattaatatgaataatgttagcaagaataacccttgttataagtattatgctggcaacaattgtcgagtcctcctcctcactcttctgggctaatttgttcttttctccccatttaatagtccttttccccatctttccccaggtccggtgttttcttacccacctccttccctcctttttataataccagtgaaacttggtttggagcatttctttcacataaaggtacaaatcatactgctagagttgtgaggatttttacagcttttgaaagaataaactcattttaaaaacaggaaagctaaggcccagagatttttaaatgatattcccatgatcacactgtgaatttgtgccagaacccaaatgcctactcccatctcactgagacttactataaggacataaggcatttatatatatatatattatatatactatatatttatatatattacatattatatatataatatatattatataatatatattatattatataatatataatataaatataatataaattatattatataatatataatataaatataatataaattatataaatataatatatattttattatataatataatatatattatataaatataatatataaattatataatataatatatattatataatataatatattttattatataaatatatattatattatataatatatattttattatataatatatattatatatttatagaatataatatatattttattatataatatatattatataatatatattatatttatatataacatatattattatataaaatatgtataatatatattatataaatatatttatatattatataaatatatatattatatataattctaatggttgaattccaagaataatctatggcatgaaagattttacctgtcaacagtggctggctcttcatggttgctacaatgagtgtgtaagattctgaaggactcctttaataagcctaaacttaatgttcaacttagaataaatacaattcttctaattttttttgaataatttttaaaaagtcagaaatgagctttgaaagaattatggtggtgaaggatcccctcagcagcacaaattcaggagagagatgtcttaactacgttagcaagaaattccttttgctaaagaatagcattcctgaattcttactaacagccatgatagaaagtcttttgctacagatgagaaccctcgggtcaacctcatccttggcatatttcatgtgaagatataacttcaagattgtccttgcctatcaatgaaatgaattaattttatgtcaatgcatatttaaggtctattctaaattgcacactttgattcaaaagaaacagtccaaccaaccagtcaggacagaaattatctcacaataaaaatcctatcgtttgtactgtcaatgattagtatgattatatttattaccgtgctaagcagaagagaaatgaagtgaatgttcatgatttattccactattagacttctctttattcttaaaaatatttaagatcactaaatttttataggactttaaaaacagtaatgtgctgctttgagtgtgtaggactaagaaatgggattcagagtagtaaagagaaaagtggaatttccaagcactatgaattactgttctttaaaaaacagcaaaaatcaaataacagtattcctccaaaaaagatggcaagtgtaaactctataccttcatgtctcccgtggaatgttagtgatcaatttccacttctctcttttacatcttacttgcccattaactcttatacctaatccaaagattgttaatatggctatgtctcactttcaggacaccttttatttgttacttctcttcactgcaaaacttcttgaaacagtacttattttctctcctccatacacaattgaaatggctctcaactcatgcccagaagtcagtgttcagtctctcacctggcagatagcaacttacaaagatgccccaacaatacctccttgtgtctagacagtcatcattatcctttacctttttctgtatttatttctgctcctaaaagggatctctatgtaaagtattgttatactagtgcttgttataattattatcagagttaaagccatcacaatgttcccaattacttaaagacattggaataacattttttttattttccacatcttgccaaaaaatattttgttatcagtaccttaataatggctattatatattgaccattactatttgctagaaaatttatatacctggtcgtatccaatcctcacagaacttctataaagttgtgctattatcacctatattttccagatgtggccgtaagactgaaatcacttaggtgacttgtctaaggtcattcagatacatagtagataacccaggatttgaacacaggcctcctagcacacaagctcatatcttaactactttaatacgttgctcgatgggatcttacaggtcttcattcacccctttcctgctcacacaaccacaacctgcagctattacctattgttaggcttaaaataattacttggcttcatttccaagctccctcccttccaattcacattgagtccagagctaaattaaacaatcattcaaaatttttcagtagttcttgtctctataataaaacagaaatgctttagaaagcattccaaaatctcttaccagttttatctcctatgaaagtccttcacactttctctcatttaaactttattgcattttcctcactttttctcacttcacttttgaattccctattcttttatcctctgttaatttttaagtattatatttgtgatattattttttctttttttctattttttatctttcatttcattttggcctatttttttctcttaagaactttaatatcaccaaataacatgtgtgctacaaactgttttgtagttcaaagaaaaaggagataaacatagagttatggcatagacttaatctggcagagagacaagcataaataatggtattttatattaggaataaacctaacattaatggagacactgagaagccgagataactgaattataaggcatagccagggaagtagtgcgagatagaattatgatcttgttgaattctgaatgtctttaagtaatagattatagaaagtcactgtaagagtgagcagaatgatataaaatgaggctttgaatttgaatataataattctgacttccttctccttctcttcttcaaggtaactgcagaggctatttcctggaatgaatcaacgagtgaaacgaataactctatggtgactgaattcatttttctgggtctctctgattctcaggaactccagaccttcctatttatgttgttttttgtattctatggaggaatcgtgtttggaaaccttcttattgtcataacagtggtatctgactcccaccttcactctcccatgtacttcctgctagccaacctctcactcattgatctgtctctgtcttcagtcacagcccccaagatgattactgactttttcagccagcgcaaagtcatctctttcaagggctgccttgttcagatatttctccttcacttctttggtgggagtgagatggtgatcctcatagccatgggctttgacagatatatagcaatatgcaagcccctacactacactacaattatgtgtggcaacgcatgtgtcggcattatggctgtcacatggggaattggctttctccattcggtgagccagttggcgtttgccgtgcacttactcttctgtggtcccaatgaggtcgatagtttttattgtgaccttcctagggtaatcaaacttgcctgtacagatacctacaggctagatattatggtcattgctaacagtggtgtgctcactgtgtgttcttttgttcttctaatcatctcatacactatcatcctaatgaccatccagcatcgccctttagataagtcgtccaaagctctgtccactttgactgctcacattacagtagttcttttgttctttggaccatgtgtctttatttatgcctggccattccccatcaagtcattagataaattccttgctgtattttattctgtgatcacccctctcttgaacccaattatatacacactgaggaacaaagacatgaagacggcaataagacagctgagaaaatgggatgcacattctagtgtaaagttttagatcttatataactgtgagattaatctcagataatgacacaaaatatagtgaagttggtaagttatttagtaaagctcatgaaaattgtgccctccattcccatataatttagtaattgtctaggaacttccacatacattgcctcaatttatctttcaacaacttgtgtgttatattttggaatacagatacaaagttattatgctttcaaaatattcttttgctaattcttagaacaaagaaaggcataaatatattagtatttgtgtacacctgttccttcctgtgtgaccctaagtttagtagaagaaaggagagaaaatatagcctagcttataaatttaaaaaaaaatttatttggtccattttgtgaaaaacataaaaaaagaactgtcacatcttaatttaaaaaatatatgcttagtggtaaggagatatatgtcaacttttaagaggttgaaaaacaaacgcctcccattataagtttatacttcacctcccaccactataacaacccagaatccatgagggcattatcaggagtgagtggaagagtaagtttgccaatgtgaaatgtgccttctaggtcctaga

SEQ ID NO: 45306 - DNA, 1758 bp, Homo sapien
cgttggcacaaagtatattacttggatccatctatgtcattttccatggttaatgtttaaaagcacaggctttaaagtaaaaaacaaagagctggattcaactctactgactcttattaatcatgattttgggcacattacgtagctttcatgagctttagtttctacatttataaacaggagattatacctattatgcatggttattatgaaggaaaatgacaaaatagatataaatcaaatagcccacttcgagacatattaagcatgaataaacattagatactattaaaatcctatatattaacaaagccaaaagtttcaaactttactttttcccaacattcttgtgaaatatgacacatcccaatcttaacagatgctcatttgggatactgtacttgtgagtggaagtgtgtatatttgtgtgcaagtgtgtactcatatacttccaccttaccaccctagaaaggcatgatgaaaatttaagatagaaggaaaatataaattgaaaaaaaaaaaccttaacaaatgattctgacaaatatcttctctttccagggagaatcactgagccagaataaaattgaacactaaatattctaagaaaaaaggaatctagtttgtcaaaatgtgacttgaattaatagataaggagagtcagatgataagagggtcaaaattatgtttatcttaggaaaagtagaatagaaaatttataagcagattaaaaacacataataaaagtagtaaataataatgacagtatctcaaatcagtgcaggggggaaaggcctactaatgtgatggtgggataattggatagcaatatgggaaaagatatatttaatttatttgctacaccaaatgccaggacaatctctaagtgaattcaagacataactcttttttcaaaaaaactatgcaaatattaaaagaaaacaagttaatgtttttataatctatgaatatggtaaagatggataacattgactatcaaattaatttttaatgcgtaataaaactatgagaaaatttaaaagtgagaagaaactacttgtaactcacataatagactagtacttctaacacatagggaacttctaaaacaaaacccaaaatattaataggaaaatgggcaaaacagttaaacttacagttcatacataaggagaatcagtctttttttttttttttacagttgtaggcagaaaacttttatttttcatttatttgtaaaatttacccctaatttattcataattcatttaactgctaagggcattaatgtgtacaacgccatgggagaaaccagtatattcagaatttctcctgaaatttgaccagaagttatgggcatccctcccctgggaaggaggcaggcagaaaagtttggaatctatgtagtaaaatatgttactcttttatatatatacatatatgtgtgtatatgtgtatatatatatacacacatatatacatacatacatacatacatattatctgaattaggcctggtcttttttaatactttaagttctgggatacatgtgcagaatgtacaggtttgttacacaggtatacacctgccatggttgtttgctgcacccatcaactcaccatctacattaggtatttctcctaacgttatccctctccttgcctcccacctcccgacaggccctggtgtgtgatattcccttccctgtgcccatatgttctcattggtcaactcccatttatgagtgagaacatgcg

SEQ ID NO: 45307 - DNA, 4440 bp, Homo sapien
gagaatgatggtttccagcttcatccatgtccctgcaaaggacatgaactcattcttttttatggctgcaagaaatgcaaatcaaaaccacaatgagatgccatctcacaccagttagaatggcaatcattaaaaagtcaggaaacaatagatgctggagaggatgtggagaaataggaatgcttttacactgttggtgggagcgtacattagttcaaccattgtggaagacagtgtggtgtttcctcaaggatctaaaactagaaataccatttgacccagcaatcccattactgggtatatacccaaacgattgtaagtcattctactacaaagacacatgcacaggtatgtttattgcagcactattcacaatagggaagacttggaaccaacccaaatgcccgtcaatgttagactagataaaatgtggcacatagacctggtcttaaaatcaagaacagagattgttacttttacatccattcctaattgataaaccattcagttataccacatcttagcttctggactacaatgaccatatttggggttttctttctaatttcattataggttcagagggtacatgtgcaggtttgagacaaaggtatattgcatgatactaaggtttggagtacaaatgattccacctcccaggtagcaagaataatacccaatatgtagtttttcaactctttcccctcttcctccatcctccctctgctactctgtggtgtctgtttttctcatctttatgtccatgtgtactcgatgtttagctcccccttgttaggtgagaacatgtggtatttggttttctgtttcagtgttaattcacttaggataatggcctccaactgcattcatgctgctgcaaaggatgtgactttcttcttattagctgcatatattttgtggtggatttgtaccacatttactttatctagtccaaagttgttgggcacccaggtggattccatgtctttgctattgtgaatagcactgggacaacccatacaagttcatgtgtctttttggtaaaacaatgtattttcctttgggcatatatgcggtgatggaattgctggatcgagtggtagtttaactcttagttctttgagaaatccccagactgttctccacagtggctggactaagttgcattcccaccagcagtgtagaagtgttccccattctctgtagcctcaccagcacatgttaaactatctttaaatatatgaaaaaaatgttcaagtctctcagattaagatgcatgcaaagtaaaatgatacttaaatatcagttctaacctataaaatatcaaatatctgacctcaatatttgataatccaacctgttgatgaagctgtagagagaggcacccttttttttttttttaattatactttaagttttagggtacatgtgcaccttgtgcaggttagttacatatgtatacatgtgccatgctggtgcgctgaacccactaactcgtcatctagcattaggtatatctcccaatgctatccctcccccctccccccaccccacaacagtccccagagtgtgatattccccttcctgtgtccatgtgatctcattgttcacttcccacctatgagtgagaatatgcggtgtttggttttttgttcttgcgatagtttactgagaatgatgatttccagtttcatccatgtccctacaaaggacatgaactcatcattttttatggctgcatagtattccatggtgtatatgtgccacattttcttaatccagtctatcattgttggacatttgggttggttccaagtctttgctattgtgaataatgccgcaataaacatacgtgtgcatgtgtctttatagcagcatgatttatagtcctttgggtatatacccagtaatgggatggctgggtcaaatggtatttccagttcgagatccctgaggaatcgccacactgacttccacaatggttgaactagtttacagtcccaccaacagtgtaaaagtgttcctatttctccacatcctctccagcacctgttgtttcctgactttttaatgattgccattctaactggtgtgagatgatatctcattgtggttttgatttgcatttctctgatggccagtgatgatgagcattttttcatgtgttttttggctgcatagatgtcttcttttgagaagtgtctgttcatgtccttcgcccacttgttgatggggttgtttgtttttttcttgtaaatttgtttgagttcattgtagattctggatattagccctttgtcagatgagtaggttgcaaaaattttctcccattttctgggttgcctgttcactctgatggtagtttcttttgctgtgcagaagctctttagtttaattagatcccatttgtcaattttgtcttttgttgccattgcttttgtcccaccgatcccacagaaatacaaactaccatcagagaatactacaaacacctctacgcaaataaactagaaaatctagaagaaatggataaattcctggacacatacactctcccaagcctaaaccaggaagaagttgaatctctgaatagaccaataacagaagctgaaattgtggcaataatcaatagcttaccaaccaaaaagagtccaggaccagatggattcacagccgaattctaccagaggtacaaggaggaactggtaccattccttctgaaactattccaatcaatagaaaaagagggagtcctccctaactcattttatgaggccagcatcattctgataccaaagccaggcagagacacaacaaaaaaagagaattttagaccaatatccttgatgaacattgatgcaaaaatcctcaataaaatactggcaaaacgaatccagcagcacatcaaaaagcttatccaccaagatcaagtgggcttcatccctgggatgcaaggctggttcaatatacgcaaatcaataaatgtaatccagcatataaacagagccaaagacaaaaaccacatgattatctcaatagatgcagaaaaggcctttgacaaaattcaacaacccttcatgctaaaaactctcaataaattaggtattgatgggacgtatttcaaaataataagagctatctatgacaaacccacagccaatatcatactgaatgggcaaaaactggaagcattccctttgaaaactggcacaagacagggatgccctctctcaccactcctattcaacatagtgttggaagttctggccagggcaattaggcaggagaaggaaataaagggtattcagttaggaaaagaggaagtcaaattgtccctgtttgcagacgacatgattgtatatctagaaaaccccattgtctcagcccaaaatcttcctaagctgataagcaacttcagcaaagtctcaggatacaaaatcaatgtacaaaaatcacaagcattcttatacaccaacaacagacaaacagagagccaaaccatgagtgaactcccattcacaattgtttcaaagagaataaaatacctaggaatccaacttacaagggacgtgaaggacctcttcaaggagaactacaaatcactgctcaaggaaataaaagaggatacaaagaaatggaagaacattccatgctcatgggtaggaagaatcaatatcgtgaaaatggccatactgcccaaggtaatttacagattcaatgccatccccatcaagctaccaatgactttcttcacagaattggaaaaaactactttaaagttcatatggaaccaaaaaagagcctgcattgccaagtcaatcctaagccaaaagaacaaagctggaggcatcacgctacctgacttcaaactatacgacaaggctacagtaaccaaaacagcatggtactggtaccaaaacagagatatagatcaatggaacagaacagagccctcagaaataatgccgcatatctacaactatctgatctttgacaaacctgagaaaaacaagcaatggggaaaggattccctatttaataaatggtgctgggaaaactggctagccatatgtagaaagctgaaactggatcccttccttacaccttatacaaaaatcaattcaagatggattaaagacttaaacgttagacctcaaaccataaaaaccctagaagaaaacctaggctttaccattcaggacataggcatgggcaaggacttcatgtctaaaacaccgagagaggcactcttatgcattgttggtgagaatacaaaatggtacaactcttggcaatatcttaaaaaatttacatggtactgacttttggtctagcaatcctacttctatcctaaagatatattggcaaaaatacaaaataattgatgcactcaagtctattcattgaagcattgtttttcatagtaaacggaaagtaggc

SEQ ID NO: 45308 - DNA, 3863 bp, Homo sapien
ggcagatcacttgaggccaggaattcaagaccagcgtggctaacatggcgaaaccccatctctaccaaaaatacaaaaattagctgggcgtggtggtgcacacttgtaattccagctacttgagaggctgaggtgggaggatcgcttgaacctgggaggcagaagtttcagtgagcccagaacgtgcctctgcactccagccaggatgacagagcaagactccatctcaaaaaaaaaaaaaaaaaaaaaggaaaataaccaaatgacaattagtgagtactacttgcaaaacttgtacgcaatagagtatgaagcaactataaaatgagagagaaatatctccaaatactactctaaagtaatctacaaggtataccttaactgaaaagaaacaaaaaagtgacaccagaatgctatttttatgttaaaacagggataaatacattggatttacatgcatatataagtatatattttataaatgtttaaataagcatacttaaaatggcaaaaacgtaatacatatataattttcttatggcaggaggaggaaacagggcaaggcacagggataaaagttattctgaatacatcttattttatatttttgactttgaaatcctgtagctgttttatgtaatataaaaatgtaattaaattaacagaaaaaaattacaactgctaaaaatcaagatctggcattttaattaagttataaaacatcggagaaaagaattgtttcatgggacactaacatacagacaaattcatttggaacccaatgaattaatgggcctaagataacaaccaatagaagctaaaatgacgaataactgtttcagaagaaaacatatatggaatgaatcagctgaaaatacctgaacctactgatcaatttttatatcacatgaagtgaatacacataaagtataatatggagcacatagaaccaactagaaatgagcctaattgttaaatattctctattttatgacaatatacaggaaatatgtcgaagagagaaacatgcaagaacaccgtagggtttaataagataatcacaaggtatggaatattcaacaggatgagtatcctggattattcagcaaatacacagagctaaaaagcaggagaaaggaattcatatatatttttaaaaactaaaaagatatattagctgatgcaactttgaaacttctttagatcctgattcaaatagagcaaatttaacaaatatatttgaaactattaaaataatttaaaaatgaccaagtatttgattatatcaaatatagacaataataaccttgaatgtacatggattaaatgtccacttaggggctgggtgtggtggctcatgactataattccagcactttgggaggccaaggcagaaggattgcttgaggtcagaggttcaagtgcagcctggtcaacacagtgaaaccctatctctacaaaaaacaaacaaaaataaaaaattaactaattttaaaaaatatatatttcttctaaattctccacctgaaagatatagactgactgaatgaattttaactatgatctgactatgtgcttccctgaacaaatgcactttacctgtaaaacacatattaactaaaagaaaagagatggaaaaaggtattccatgaacagaaaccaaaatgagtaggagtagctatacttctgtcagacaaaacagactttaagtcaaaactagctttagaaaaaagacaaaaatgcttattatacaacgataaaggaatcaatccagaaagaggatataacaattttaaatatatatgcagccaacactggagcagccagattcataaagcaaatactactagatcaaaacagagaggtagactcaaatataataatagtgaaggacttcaacaccccactttcagcattaaacagatcatctaataagaaaaccaatctcgcagccctcaccctggagagtccacaggtaccaggggttggtctgaacccccagcacagagcacctgcctcacagaagagtggctgcatttttcttcctgcagttttcagtcctcacttctccttaccaagcagggccacctggcctgggactccggtacaactaccctgccccccacctgacgacttcaataagaagtagcccagcatttctccaaggaggaaataccagagtcaattcacaaccactgcaattgcagtggtaccaccataacagcccttgggctgcagaaggaactaagagtctagtcactacagtggcaccttcagcacaccacagccaccatacagagaggaatccagccccctcccctgggaacccccaccacccactccaccaggcacagcacccagctcataactgcagatcagttgccccacccacagctgagcttacctactggcagtggcccagactttccctagggagaggctcccagaggcaaacggcagcctctctgcccgtgtcacagcagcagttctatccatgctgtcctcaggcttggaaagaaacaaagcgcctgaaggctgcacctgaacttacagcatgccacagttcccatatggagaggagaccagtctctcctcccagtgagccctaaaccccctgatccccaacaagcagagccctaacctcacaccagcagtacagctgccccatcccccaggctgaacattcccagtaatagcagctccacctggagatggaacccccagggtcaactaaaagcccctctgccactgcctctacagtggtactacccctgctacccttgaactaacaaaggagcaaagaccccagtgctttatccacacctccaacaagctgcagtcgaccacaaagaagaaacacgtctgtctcccatgggtcctacccacaccccctgctgttcaccatggatgatagagtcaacagtgtgaaaacgaccatactgccaaaagcaacctacaaattcaatgcaattcccatcaaaataccaccatcattcttcacagaactagaaaaaacaaggctaaaattcacatggaaccaaaaaagagcccacatagccaaagcaagactaagcaaaaagaataaatctagaggcatcacattactcgacttcaaactatactataaggccatagtcaccaaaacagcatggtactggtataaaaataggcatatagaccaatggaatagaataaagaacccagaaataaagccaaatactttcagccaactgatctttgacaaagcaagcaaaaacataaagtggggaaaggacaccctattcaacaaatggtgctggtataattggcaagccacatgtagaagaatgcaactggatcctcatctctcaccttataaacaaatcaactcaagatggttcacagacttaaatctaagacctgaaaccataaaaattctagaagataagattggaaaaacccttctagacattggcttaggcaaagacttcacaatcaagaacccaaaagcaaacacaacaaaacaaagataaatagatgggacttaattaaactgaaagccttctgcacatcaaaataaataatcagcagagtaaacagacaacccacagagtgggagaaaatcttcacaaactatgcatccaacagaggactaatatccagaatctacaaagaattggaacaaatcagcaagaaaaaaaaccaaacacaaggatgacagtggaaatacaaaaacaagacataaatattctgaatagtgataataaaacagtgcataccagaatacaaactgtttccaagttacaatggttcaaccatttttcagctttatggtggtgtgaaagtgatatccattcattagaaaccatgctccaggatgggcg

SEQ ID NO: 45309 - DNA, 2651 bp, Homo sapien
gatcacaaggtcaagagatcaagaccatcctggccaacatggtgaaaccccgtctctcctaaaaatacaaaaattagctgggcattgtggtgcgtgcctgtaatcccagctattcgggaggctgaggcaggagaatcacttgaaccagggagtcggaggtgttgcagtgagccgagatcgtgccactgcctccagcctggcaacagagtgagactccatctcaaaaaaaagaaagaaaccctactccgaattttgaattttgatattttcctggactaccaatatgtggcacaatgctctctcacaatgttgtgcaacagcggtgagctgcagcttccagtcagctaaatgataataaaggtagataatccatcttgatatcttcctgaagaacataatgcctgcctaccatcaacaggcatcaatactttctaccagctattctcaaccctcatgatcggaagagacagagactgactgtgtcaaagtattagtcccatcattcagcaattaactttagctcaatgcttcaaaaattcttcaggccctgtgtaatttcagctacgtacattaatgatgagtacccatacaaccattctgtttcttattttcagtaccatatttaataaatatcagttattcaatactttatttagacattttgttagattattttgaccaactgaagtctaatctaaatgttctgagcatgttcaaagtaagctaggccaacctataattttcggtgtgctaaatgcatttttaacttatgatattttcagtttacgggggtttgttgagacataacttcatcatacatcaaggagcatctgtatatgggatatagttaaagcagtgatcagaggaaaatctatagccttaacacatttattaataaaagtgtaggaattaaattatcagctgaaaaatgtaaaaagtatctaaaagagtaagcagaaagtacaagaaagaacccaaagtagaaaaaagtgaaaattaataaaataagaagccaaaaaacagatcaaatcagtaaaccaaaaatcttgttctttaaacaaatcaacaaagttgacaaaaaaattagatcttttaatcatgaataaaaaaaagagaaagcacaaaaatgaataaggaatggtgagagaaataactattgataatcagcaaataaaaaatcattaaaaacaatgttgttcacatctatgaaaaacattgaaagctagagggaatgggtaattttctagaaaaatacaattcaccacaactgacttcaaaaaaaaaaaaaaaaaaaaagaagtaccgcacttatgtgagcaatttccatagagaaatacagttgtcatggaattataacacacacacaaacactaggtttagatgttttcacagagaattccaccaaacctttagaaatcagatcgtccaaaggcaaattaacaactctcagccatttgaggcaaaatattacaattgaggcaagatatactgtactgaaaacttgaggaaaaagcaggagagaaagttcctttgggaaattcgaatactcaaaagtgcttacatacaatgaaaaatttggaaatccataagcatggccaaggtgggacacatgctcagaaaaggcctgagaagacactaataactcacctttagtaattcctaggctcacagcaagaaaaaatgaaggctaaggcagaattatatatggctccgctaagtgttgagggagccccaatacagagtcagtaagcaaagtctgggagaagtttttcatatttttttctttcttggctccttgcagtcaaggaaatcatttttaaatcactaaatgctaaatgaacacaagctaaaggaaccgagccttcaaacatcaaatataaaaaagaatgcagatattacaaaaccagtttacaaaagttactaaacaaataaaaactacatcccacagtgggtaacaaaaataaccttgaagaagggaaaaatttggtttccagaataaacacattataatatccaaaatgtccagttttcaacaaaaattaagaagcatgcaaataaacacaaaactatggcccatttacagaagaaataaatgagactctccctgagtaagcagatattgaaaatattagacaaaaactttatataactgtcttaaataaacttaaagagctaaagaaacccaagagaatgacatataaataaataagaaatatgaatttttttaaaggtacaaaaaaattctgaggctgaaaagtacaataagtaaaaagttactttttacttagggttccaatagaagatttgagcagctggaaaaaagaatcagtgaacttgatagatcaaatgaaatgattcagtctgaagagcaggaaaatgaaagaatgacaacaaaaaagaatagagcctaaagacctgtgtaacaacatcaagaatgcctacatacagaatcctggtggggagtgaggggcaggaagactatttgaagaaatgtgtttgaaagcttcccaaatttcactaaaaacaaatatatacattcaaaaagctcagtgaacttcatcaaggaaatatacaaagatattcacaccaagacacactatgtttcaaattgtcaaaaggcaaagcgaatgtttgaaagcagcaagagaaag

SEQ ID NO: 45310 - DNA, 3755 bp, Homo sapien
cgtcatttacaaaggatcctcagtaagtttgacagcagagagctcattataaaccatgggtgccagaagagcttaggatgacattttaaagttctgaaagaaaaaaacactgtcaaccaaaaattctataacttggaagatgccccttcaagtattaaggataaattacacattcccagattaaaaaaaagaaagagagagagagagaaagagaaagaaagaaagagaaagaaagaaagaaagaaagaaagaaagaaagaaagaaagaagagaaagaaagaaagaagaaagagaaagaaagaaagaaagagagagagaaagagagagaaagaaaaagaaggaaagaaagaaagaaagaaaaaagaaagaaaaagaaagaaagaaagaaagaaagaaagaaagaaagaaagaaagaaagaaagaaagaaagaaagaaaagcaagcaagctttaaaagttcatgtttggtaggctgtacttcaagatacacttttaaaaaaaagactccttcagatacaaactaaaaaacactagaaagtaactcaaaaccacataaagaaataactccagtaaagataactacataggtaaatataaaagcaattatcacattttttgtaagtcttttttaatattctatatgttttaaaacaaatgtgtaaaataatgactataaatctatgttaatgaagcatgatgtatacagatgtggtttgtgaaattaccaacataaagaaattcataggaaactaaataataatagagattttgtatactattgaagttgtttcaatttactctaaattgttccaaattaagaatgttaattgtaaatccccatggtaaccactaagttaatatcttttgaaaatacagaaaaggaaagcacagggtaaacacagtgatatgctacaaaatagcaactaaacacaaaagaaggcgataattgaggaaattaggaacaaaggaggtataagacatacagaaaacaaaagcaaaatggtaggagtaagcccctctttatcagtaattacattaaatacaaatgaattaaactctccaatccaaagaaagagattaacagaatggattttttaaaaatgatccaactatattgtccacaagatactcactttagatcaaaatacacaatgagttgaaatgaaaggatgggagaaaatattccatgtaagtaataaccaaaggagatctgaggcaaatatacttatatcagacaaaatagactttaagtcaaaaactgttacaaaatacaaagaacagtatatattgatttcaaaattaattaagaagatataacaattataaatatatgtacaccaactaacagggctccaaaatatataatgtaaccattgagagaattaaagggagagacagacaattccacgaaaattgttgggcatttgaaaacccaactttaaataaaagataaaacatctagagcaaatatcaagggaggaattagaggatttgaataaaactataagcaataactatagataacacttctctcaaaaactgcagagtacacattcttctcaagtgaacatggaacattctccagcacagatgatatgttaggccataagataagctcaataaacttaaaaagattgaaatcatgcaaagtatcttcactggccacaatggaatgaaataagatatcaataacaaaagaaaaactagaaaatttacaaatatttggaaattaaacaacacagtatttaccaaccaatgaatcaaagaacaaatcatgagggaaattagaaaatgtttagagacgattgaaaacaaatatataacaagatgggtgtgatatatcaaaagcagtgctcagagttgtaacacctacattttaaaaaagaaacatgtcaaatcaataaccaaactttactcaataaaccgtaaaaggaagagcaaacaaaatccagagctagcagaaggaaggaaatgaagattagagcagagataaatgaaattgagaattaaaaaattatacagagatcaacaaaattaaaagttggttcttttaaaatatcaataaaattaatatacttttacatagactaagcaaaacatctctattcagctgactttttttacaagggagccaacattattcagtggggaataatagctttttcaacaaaaagtgctgggaatactgaatattcatatgcaaaaaaaatgaagctggacccctacctcacattatatacaaaatctagattggatcaataatgtaaatataagagtgaaaaccatacatgcttagaagaaaacatggaaataaaacattgctgtggattggcaatgcgttcttagataatacaccaaaaatacaagcatgaaacaaacaaatgcagccaaaatgtaccagaatctgaaaacatctattatctatgaagaattagaggggaatttggtgaaagaaatatgggagaatgggacattgctctgtgaatgcttttgtgcataattgtacatttttaattaagttaatcttttacactctcaaagtgtgatattaagcaagcaaagataagttattacaagactctaaaaccgaatgcaatgagaaacaagtgaatccaaatatatttcaaatgaatgaatgacataatcaaacttaaggggaaaataataattaatctgattaatttttgactgttcttttagttcaaattgacttttgaacatacttggactacataccattgcttgaaaaaataaaatatctgcaaaaaattattaaatcttcatgataggcttttttctttttatattagtataaatataacaattctgaaacaaatgtatgtgcattgtaagattaagccaatgagtaaatattaatatatttgtattgctagaaccccagattctcactgtgaaaggacagagatacagatatggaataagacaaggaaagaagcagcccactgagttacattagaatcagtattatcaacataaatatgcaatgtgctctctcacatgctctttccttctcttaaaaaaatataatatggacatattatatattatatgcatagacacacgtgtgtctatacatatcctatctatacatattgaggattaacaggtgctagtagaaaatattaactttctttgtattaacaggtgttagtagaaagtagtagtaggtgctaagataaaagccataattaaacctcctggtgaatgaacacaccatcacctacaatcttaccaaaaatagaatcaagcacgtgtcctagtcaaacctctggattcaactgtcatttggataaaacgcaaaggatagtgaaaatgtcgatcttcactgagagtctaaccagcaaatttcacagtgtggacatcaagtgacaaaaatcccaaatttttcaacaaatatattgtatgggaaagaaaactttgaaaagaaacctgtatgttagaagagattttaaaaacatgacaaatgaaaaaaaatgggcaagactaaaacttttaaaaaagtttgagacagggtctcactctgtcacccaggctggagtgcagtggtgtgaccatggctcactgtggcctcaacctcctggctcaagtgatcctaccacctcagtcttccatgtagctgggactacagctgcgtgccaccacatctggctcatttttttttcttttttaagtagagacggggacttgctatgttgcccaggctagtctcaaactcctaagcacaagcgatcctcc

SEQ ID NO: 45311 - DNA, 2010 bp, Homo sapien
cggcccccatctcctctgacctcccacctctctccctcagctagtcctcgaacatgtctgatgtggtcccaccttgggacccacattgctactcctctgcctgtaggggtacccacagttatccacacagttcactcctgtctttcaggtctttgtgcaaatatcaccttctcagtggagactacaccttcaggacttaggctgtgcctggcacatagtaggtgctcagtagacactggttgtaggaaggaatctacaggttgaaataaggagatcatttccctgaggttccgaagctcatatttactcaccatttgttgtttactgctaatattgagcactatcagtaaaatacataaaaccctttgccaatccaggaagtgaaaatgacactttactgttttagtttgcatttctctgcttacaaatggattacacgcattttcatgtgctgttggctacttattcattcagaaaacatactaagtgctggctctttttcatgtcctttatcaagtttggatcatgtcatttgctgttttctttctgatgtaaactctcaaagtttgaagggtattgtcttttcctgacacatacgttgtaaataattttctggcttacattttgacttttaatttcattcacgatgtttttaatgaataattttaatttttatgaatgcaagttaaaataattctttcattgtggtttctgacatgtcatgccaataagggtcttctcctccaagagcacagaaatatttgccaatactgtccttaaaatcggtcacagtttcattttttatatatgcattttacttcaattggggcttcattttactggccctatttgaagcaagtttctcagttaattcttttctcaaagtgctaagtatggtagattgcaaacataagtggccacataatactcccacctcctttgcctcctctcccaggaggagatagcctccatctttccactccttaatctgggcttggccaagtgacttacactggccaatgggatattaacaagtctgatgtgcacagaggctgtagaatgtgcactggggcttggtctctcttgctgccctggagaccagctgccccacgaaggaaacagagccaacctgctgcttcctggggggagacagtccctcagtccctctgtctctgccaatcagttaacctgctgcttcctggaggaagacagtccctcagtccctctgtctctgccaaccagttaacctgctgcttcctggaggaagacagtccctcagtccctctgtctctgccaaccagttaacctgctgcttcatggaggaagacagtccctcagtccctctgtctctgccaaccagttaacctgctgcttcctggaggaagacagtccctctgtccctctgtctctgccaaccagttaacctgctgcttcctggaggaagacagtccctctgtccctctgtctctgccaaccagttaacctgctgcttcctggaggaagacagtcactctgtctctgccaacccagttgaccgcagacatgcaggtctgctcaggtaagaccagcacagtccctgccctgtgagccaaaccaaatggtccagccacagaatcgtgagcaaataagtgatgcttaagtcactaagatttgggcaaaagctgagcatttatcccaatcccaatactgtttgtccttctgtttatctgtctgtccttctctgctcatttaaaatgcccccactgcatctagtacatttttataggatcagggatctgctcttggatttatgtcatgttcccacctcgaggcagctttgtaagcttctgagcacttcccaattccgggtgacttcaggcgctgggaggcctgtgcatcagctgctgctgtctgtagctgagttccttcacccctctgctgtcctcagctccttcgcccctgggcctcaggaaatcaatgtcatgctgacatcactctagatctaaaacttgggttcttggaccaggtgcg

SEQ ID NO: 45312 - DNA, 2667 bp, Homo sapien
cgggtttggtggcaggtgcctgtagccccagctacttgggaggctgaagcaggagaatggcgtgaacctgggaggtggagctggcagtgagccaagatcacgccactgcactccagactgggagagagagcgagactttctcaaaaaaaaaaaaatcttaggttcttggatgttcgggaaagggggttattatctagaatccttgaagcgcccccaagggcatcttctcaaagttggatgtgtgcattttcctgagaggaaagctttcccacattatacagcttctgaaagggttgcttgacccacagatgtgaagctgaggctgaaggagactgatgtggtttctcctcagtttctctgtgtggcaccaggtggcagcagaggtcagcaaggcaaacccgagcccagggatgcggggtgggggcaggtacatcctctcttgagctacagcagattaactctgttctgtttcattgtggttgtttagtttgcgtttttttttctccaactttgtgcttcatcgggaaaagctttggatcacaattcccagtgctgaagaaaaggccaaactctggaaaaaatttgaatattttgagccaaatgtgaggaccacaacctgtgagaacggaaaataaatcctgggaccccagactcactaagccaaagggaaaagccaagctgggaactggcttatgcaaacctgcttcccatctggttcctaaataagatagctattacacaaagacaaaaaagctacatccctgcctctacctccatcgcatgcaaaatgtgtattcagtgaacgctgaccaaagacagaagaatgcaaccatttgcctctgatttacccacacccattttttccacttcttcccctttccccaatacccgcacttttcccctttacttactgaggtccccagacaacctttgggaaaagcacggaccacagtttttcctgtggttctctgttcttttctcaggtgtgtccttaaccttgcaaatagatttcttgaaatgattgagactcaccttggttgtgttctttgattagtgcctgtgacgcagcttcaggaggtcctgagaacgtgtgcacagtttagtcggcagaaacttagggaaatgtaagaccaccatcagcacataggagttctgcattggtttggtctgcattggtttggtctggaaggaggaaaattcaaagtaatggggcttacaggtcatagatagattcaaagattttctgattgtcaattggttgaaagaattattatctacagacctgctatcaatagaaaggagagtctgggttaagataagagactgtggagaccgtgcatagttgcttcctgatcagctctttatttgattgagagtgaggcagggaagattagagggaagcttacagtggaattcagggctgaggctgctattcttttgctccttgtaacttcctacagtgttgtcagcatccacatacttctctgtggggttggtctcagagccaggttaccttgtcttaggtccagtggcaccctgactggcttggtgtccttgaacaagttacctaacctctccaaacctcagtccctcagttgtaaaattaaaaaaaaaaaaaagaagaagaagagtacctactgtatagcattgatttgaagattgaatgagctggtattatacaacgtttagaagcagtgcctgacacgcaaaaggctctcaacaaatactatcctttactaatatcctgtgtgtctgtatcagagctggtggggtggagggacagaaacaagtgggagaaggtaaagagatggacaaatgatctctaaagtctctctggcactaacacaattctttattatgtgttttgtctggctctttatattgatagctgttccagaggcaatcaatagctattagtcggttttattcttatttttctgtctgatcttacaggggagcaaactgtggcaaagtatgaacttacttctcaggaaattaaccattatattggcaatcactgtgattatttgaacttcagcgtctggacaaatttagtcacatgaaatacagaagagagatttctcatggttaaaacgaagctctctttatttgcttctgctaattaaaaaatcagagctaaagatacttaaacactacagttaaaatgccatggttgtctattggcttaacgaattctcttatgaaatcaactctaaaatgctatccatcataaatcatgaaacgcaatttttcttattctctttagagctttacaattcatcttaaagaccagtgtttacactctcttctgtaggttgtacaataacttttggcgagaaaaaataaaagtctggctttctgactcataggtgtgttccctttaacagaaaaagaaaatatgtcctctttaaaactgatgatcattggtcacctcaattttattgaagttcacttctgacctctttagatgtagttctctacataaaactgcccaacagaattctctgtctgaatgtctcctccacaaacaaaattttaagaactaaaattatcatctttccttccaaatatgctctccctatgtccccagggctctccatgtgtagagctgagaccatttgccactcagtttcctcacccaattaattacaagtcccaacaattttc

SEQ ID NO: 45313 - DNA, 5077 bp, Homo sapien
cgctgttaggatcaagtctaaactcccgaccctggaacatcaggtcttcgtgctctgttcactgcttctctacctcacctgcaaccaacaccactcccacatccatatgctgctcaccgtgtatcaacatgaacaggaggtgggtgtttcagtccccaggaagacactgggccttttcaatcatctactgctgtgtaataaccaccccgcaaactgaccacatgatttcattttgcaagggttccttccttgggctgtgttcagcaaaagggtttactgagctggcaggtccaagatggcctcactcacaggactggctgttgatgggagccttgatgctcttgggctcaccccttatcctccagtaggttagagcttcttacagtggtttcaggcagcatctgaagacagtaaaagcagaagctccaaggcttcttacattctagcctggaaaatcacatcacattgcttccttcatatttttttggcaaatcaggttgcaaggcttgcccagattagggtaaagaggcaaagaggctccttttcttttcttttctttttttttttttttttttttttgagtcagaatctcgctctgttgcccaggctggagtgcagtggtgcaatctaggctcactgcaagctctgcctcctgggttcacgtcattctcctgcctcaggctcccaagtagctgagactacaggcacctaccaccacgcctggctaatttttttttattttttattttttagtagagactgtgtttcactgtgttagccaggatggtctccatctcctgacctcgtgatccttgcaaagggacatgcagaccacattagtgagaatatgtgcctgtattttgcaatctgtaacatgggcataaactaaatgttttccaaagggaatagggcaaaacaaaaaggaccttgaccactccttggccctgaataaatccaggaagcctaagagtatgactatcctgaggtagaaagagggtcacatgctggataagaggtacctgggctctccacttacaagaagagagcatggttacatttataatcaccattcccaacatgctgtgagtgcaggcagctaccaggaggagaacaaaggaaataaccaggacactcatctctaaacctgttaatttaatcacacggaacacttctatttaaaattcccgagagttaagatgtaagaatgcttatcaaggtaaatgctgttcacactgcttggagtgtcaggcctagatctctatccatcagaaacaacaatatcaataacaacaacagcaacatgatgatggggcaatttcttaaaagcaccatgtattttatcgatacatgtccgttgcagaaaatccaggtgaatccaaagaagaaataaatgtcttccacaatcccatagcccagagctaactaaccactataaagaacccagcgtggttttaactaatggatcaaaagatgctcatcaaaggctctgagctttcctgagtgctaacaggaaacatccagcatcactggtctctccaaggctgcaggtgtctttgcccatagtgcctgttttgtgtcagggaaagaatcaacctgggagccaagcccaggaatcaggatgaccaagacatactgcacaaggagggaacaaacccatccaaggacactcaaggacaaatcaagcaaatgaatttaagggagacgtgctcatggtctgctttgctgctcagcatggctgggaggcacagtggaagatcatgcatcctgcccctgggactcctctgccagagcctgagagctttctcctgcccacaggctaggggtagggcagttggaattgatccatgccttctagctagactgtgggtcccctcagtcttgggcatggtgacagcccagcatcagacagaggtcagtatcaaactagaaaatttaataaatactgtcagatttgtagacccaagaaaatataaactgccaatcacggaggaaaaaaatctctcaatgatcttatctttatatgattcccttgctgcctggagattgacatttccttggggataatctggtcataggattggtgaaggtggaagggaggcaacctccaaaggtggggccctctgctcacctgggacagggagggcctgaggtaggtgtctgtgtgggctggggaggaggatgggagcagtgcttctagatgtttccactttctcctcattagataataacgaatgggtgatttccctagtcactgcagtgtgaggaaatctacaaaattaatttcacaatacgctttacaggataggtggagaaacacatgaagtacaactgcagtgggttataaaaaacggcctttcgagttgagcaataaattcgttcaagcagccattctgaaggacaaactggctctgtatttaagaggggcattccagcacttctctagccactgggttgacaatgactcaccaaagcctctggtagccaccacaggacacccagagcatatgttttaaagctgaacaccaaactgcggacttcgggagtaagtgaactgactggtttttattttgttttactgcttttaacattacagtaactgttacaggttccagcaggctaactgggtggaaatgagtttggtttcacttagtctctctaaagagaaagcaagtcggtagactaatacctaataaaagcaaagctgccaacaattgaaattgcctaggctgctctgtgtgtcccacatgcatgggtgtgggtgccagtgtgtgtgcgtgtgtgcatgcatgtgcatgtgtgttgggatagagtggtaagaaaatgggaaataataagaatgttcagtccatagcccttcattataaaaaggtgagctgtaataaatactagtgccacatttagccaaaactttactccagccaaaggtgatattttcatgataacatcctgtgattgctttgttcttcgtcttttatgttcttcctagatgggctcagaacatacaagaattaagtacacatcttattttccagtgataatgctaccggcaaattctgttgtttgtataaacatcagccatgtttatataactaaactagtgttttgttttgtcaattcagcaagaaattagaccaaatggtggcttaatgctgcattgatttggctatcaatttgttttcacttttctgcaaaataattaatacattattaaattgaattgtgctgatgccacagttgttcttatctcaagtgtcttaaaattcatttaatttgtttttcctttggtttcattattcaaattttaacttcagttctcaagattttatctgatggaagagatggagtccattactaaggactccattgtgctccatcatgccagagttgtaaaatagatcttttaaaggaaatttactgtgattttttttctatttaagagcttcctctccagttgagcatgtaagaaaattataccaggagaatacagtaaactctatgaggcaagctataaacatgtagcattgtgattagggctggttctccttctagagacatggtaggattgcaatttcataccatccttgaagttagagagagccacgtgactcatttagccaatgaactgtgagcagaatgacatgtcacttccagctgaagctttaacaatctgagagacattcatacattttccatgtgctgtagccttatacccaaagcctgggtcccaagtgaccatgacaggcagagctccctgttgagccacagagatttagagaatggctgttaacacagcataatccagcccatcctgactaatctgatattaacatgtataataaagaattctatcaatgctgagggaagatgactagttaaggtcctaggttgcaagtctcaaaacctcttctaaggattgtagacaggaaattaaatgacttctagtccctagagttcccaatctcctaccatcccatcctaatatgacagaagtaattcctgagttgcttctgaaaccagagcttccctcagaacccttagcctgccagatggcttcttggagagccctcactcacttttctccttctgctattgctgctcattcattccagtttttaaaaattcatctttatccaggaacctcgcttctagaaaagtcatacaggtgcttccaggaggctacatgggcacccatatttttctagccactttcattagaccaatgcagcagagaagaaaagcctcaataattattatgacatggcatgttaggataccaagtaaattgcatttgtaaaatgtgattttctgttggtgttcacttcagctctactgacatttggtaagtattattgactgactgactaactaatgtggtcattagtcttcataaagaaaggctctctacaaaaacggagggatgccctttttctggcatttaatacgtaagaaattgcctccaatagaaaccagagttgcctgattactatcagcacaggagaaatgtattaatgtgcctttctagtaacaggtttttagaaagtcaaatataaacaaatctgtctatttgtgtgtgtgcatgtggtagtggggagggaagaaaaaaggagggggagagaaagagaaataagaaccaagtttattatactgtattcagggggaaaaaattttcccaaggtcctaacagaagagcaaagtgccactgtcaatagcctcagtagtgttagggttgcttttatttatttatttatttatttatttatttatttatttatttttccttttttttctttctctttttttcttcttttttttttcttttctttcttttttttttttttttttttttttggacagagtctcacactgtcacctgggctggagtgcattggtgcaatctcgactcactgcaacttctgcctcccaggttcaagtgattctcctgcctcagccgcccaagtagctgggattacaggtgtctgccaccgtgcctagctaatttttttgtatttttagtagagatgaggtttcactatgttggccaggctggtctcaaactcctgacctcatgatccaccca

SEQ ID NO: 45314 - DNA, 3548 bp, Homo sapien
cgcccctggccaggattgcttttacagccagtcttcaggtgcccactgtaggaacaatgtcatttaaccctcgggattattctgtgccaaatatggataatgactaatatccaacacagatattctcagctcagaagagcaattagcaaattcataaattaagtgcttgcttcctctttagtcaaatacaaacgtttgttaaaagatattattttgctttacactttttctctcagaaataagcagatgcttgaattcccacagtgctgcttgagcctcacaccatgtcatcctgccaggcacccagatccagttctagagtttcacatgatcgtgagtgttggttaataagtcaatgtgaactgggaggggagatttttcaggagtgccacagggctctccctttaatcacatacactccctgctttcattggaaagtgtataatgatgtcagagtgccccagaatggagctagttggaagactgccgtcatagggatgccttagtgaattaataaggttttaatttctggctctcaactttgtagatgtaaaagttgatttatcaatatgtgagaaaggatgaatctttctgaaggttatgtcatcacactcactaagcacacagagaataatgtctagaatctgagtgccatgttatcaaattgtactgagactcttgcagtcacacaggctgacatgtaagcatcgccatgcctagtacagactctccctgcagatgaaattatatgggatgctaaattataatgagaacaatgtttggtgagccaaaactacaacaagggaagctaattggatgaatttataaaaatatgcctcagccaaaatagcttaattcactctcccttatcataaggataatcttgcctaaagggacagtaatattaaagacactaggaataacctctgtactttggacagtagacctgcatagcccattaggcctcaatgaagtcttatgcaagaccagaagccaatttgccatttaaggtgattctccatgtttctgctctaactgtgcttcacaatactcaaaacactaaatcaggatgtttcctggagttcagggagctgtccgtgttactgagcagttctcagcaacacaaagatcctactgactcctcatcagacttctttctcactggaattttacacctgggctgttaacaccaggccaggtcaaattcaaaggagagaaaaaagctcattatgaagggtaaaatccaaaacactgtgcataaagatatggcacaatttttatacataaagatttcataaaaccaaagcatcaggaaatgaaaagagatacagaaagaaaaatgatggtaaatgagacattaatttacccttctaatctctatcacagcaaaaagataattaaaaaatctatatgaggaccacaaaatacacaaaaattatgtagcaaagcctatagcctgaaaaagtaaacattgaaatttgtatgtccataaaatgtttacaaaattcagtacatattacacaccccaccctaaaaacatctaagcaaagtagagaatgtagaaatgctacagattatattctctgattatgacacaacaaaactagaaattacagcatggaaatttaaaagctttctcttaaataattctatgtcaaaaagaaatccaggccgggtacagtggctcatgcctgtaattccagtactttgggaggccaaggtgggcaggtcacttgaggtcagcagttcaagaccagcctcgtcaacatggtaacaccctgtctctactaaaaatacaaaaattagctgggcctggtggctcatgcctgtaatcccagctacttaggaggctgaggcaggagaattccttgaacccagaaggtggaggttgcagtgagctgagattgcaccactgcactccagcctaggtgacacagcaagactctgtcaaaaaaaaaaaaagaaatccaaataaaatttccagaatatgtggaaaatagtgacaataaaaatattacacatgtgtaatcccagcattttgagatgccaaggtggcaggatcacttgagaccaggagttcgcaaccagcctggacaacatagggagactccatctccacacacgccaaaaaaaattttaaatagccaggtatagtggtacttcctgtaatcccatctacttgggaggctaaggtgggagaatcacccaacctcaggagttcagggcttcagcaagccatgatcatatcactgcactccagcctcagcaacagagcaagatcctatctcaaaaaaaaaaaaaaaatcacatgtgggaaatagctatagcacaataaaaataaatgtattaagtatgaacaacaaaaaagctagtaaaggttgaacaacaactatccttaggaaagtggaaataatgtattaataaatatgaaagcaggctagccacggtgactcacatctgtaatcccagcactttgggaggctgaggcaggcagatcacctgaggtcaggagttccagaccagcctggccaacatggtgaaatcttgtctctcctacaaatacaaaaactagccaggcttggttgtgcactcctgtaattcgagctacttgggaggctgaggcaggagaatctcttgaacctgagaggcagaggttgcagtgagccaagatcatgccactgcactccagctggggcaacagagtgacactccatctcaaaataaataaataagaaagcagaaactaataaactagaaaacagaaacatagaactaatttataaatcaaagcactatgccttgaaaagagggagaaaaattgtgaattaaggaagggaagagatggttggagaggaggtgggagaaggcagagataattgaaggagcaaaagcatctggagaagcaaagccactgaaagatgaacagggctctgaaagagatgcttgactgctatcttttcaaatgactgcagttcccagtgacatcatttttctcctccctggaagtctgaggggcagttcacttatctcctcccctcccctactcctcaccccacactcaaaacctgtctatgctcctttcattctcatatgacagatttcagatggcattcttatttccctgatttctttttgagatagcttgcatttccctcctctatataaagccaccgtttatcaaatgcctacatggaccaagcagtccacaagggcttcacagacagttttactaaactcatgccaaaactttcaggttttatacctaccttatagataaagaaattgaagcttatagagtttaagtaatgttcccaaagcctcgtggctagtaattcaaacctaatttctgcctactccaaagtctatttttccttatgatactctactgcctctccatggataaagacagagatcacatattaataaaatttgcacaaagtcggcaaattgttgaaagggaaggctaagatgattaataaaatcaagagccagatgatctcaacaacctgaaataactggctgacaaccaatttgaataactccctgcg

SEQ ID NO: 45315 - DNA, 1705 bp, Homo sapien
cgggcctgctggtggatgcctgtagtcccagctactcgggaggctaaggcaggagaatcgcttgaacccaggaggtggaggttgcagggagccgagatcgcaccactgcactccagcctgggcgacagagcgagattccgtctcaaaaagtaaaataaaataaaataaaaaataaaagtttgatatattcagaatcagggaggtctgttgggtgcagttcatttgaaaaattcctcagcattttagtgatctgtatggtccctctatctgtcagggtcctagcaggaaattgttgcactctcaaaggattaagcagaaagagtttaatgaagggtctctttccagggttaagggaactgctagggtttggatatttgaccactccaaactcatgttgaaatgtgatccccattgttggaggtggggcctaatgggaggtgttttggtcctgagtgtggacctctcacgaatgtcttggtgccatccaagtgagttcttgctcgctcttttttttctttttgagatgtagtttcactcttgctgcccaggttggaatgtagtggtgcgatcttggctcactgcaacatccacctcacgggttcaacccattctcctgtgtcagcctccagagtagctaggattacaggtgcccaccactatgcccagctaatttttggtatttttagtagagacggggtttcaccatgttggccaggctggtctcaaactcctgacctcaggtgatacacctgcctcggcctcccaaagtgctgggattacaggtgtgagccaccatgcctacctagttctagctctcttaattcccacaagagctggttgttaacaagagcctggcacaaacccctctctctcgccacgtgatctctgcacatgccagcttcccttccccttctgccatgagtggaaacagcctaacgccctcaccagaagcaaatggtggcaccatgcttcttgcacaccttcagaactgtgagccaaataaacctctcttctttaaaattattcagcctctggtattcctttataacaacacacacacacacacacacacacatacacacacacgcaaaagcagactaaaacaggaactaattagaaatggtgatgcaccgagggattggcaccgaggctccccaacaggaactgaggtcatggatagaaggacacattcatgttatttttttctaatggttaagtaattatttgctcttactctcaaaatttctgccaaggcctcccatggaccaaactcaactagaatctaggaagcagagaacctgagtgttgcattcagcagaagtcagcttcctagggaatcttgcaggaagggtgaaggtagagaatctggtggggaagcaagcaaatgcccatcacatgcactttcctccaacagagcgactcagatgctataaaacttgctaacacagtctcagggtctgatcacagtaacatacaatccaggttttaatcatcagaaatcacagtcctattgtcttctgcacagacccaaacacacttggaggtcatgttcaatatgaatacctcacagagaaggaaatttacacgcgagaagtacatctgcagaaagccagctggcatgtcaaccattcaaaaactcagggtgttctggataaagaagactcaggaagacaagtatgaagcataatctgtgacattccatgcg

SEQ ID NO: 45316 - DNA, 8615 bp, Homo sapien
gaatttatcttcatataaacaacactgagctaaatctcaatatttcagatctctagaactatccatcagtgaaatggattgcaaatacaaagagtaataccatgtcacttaagaatagaatcatggacgaggctgccacctgctgttgggggccactgcagaagaaattccagaacactggactggagagcacctcactttccttacagctctaagtttctgactcagtgacctgattcactaccatatacacaaagacccacttacacaaatgactgttcttcacactaggcccatggagacagggataaaattctgaatttgctcagataccttctccgctactgacatctaggcattacacaattcatctcttcatatttaacctttgaagtttgctacttctcagagagactaatgagtagtgagcaaatatcctgaagctgagaatgcttctacctcctctcaaaacaacggaatattcatcaaaacacagcagttctgcacttaactttaggccttttctaacaccttgtttcttggcagtaactgtggccagaatagctctttccacagataaaggaccttttgaaaggatagggtctctagatagaaaagcaaatgcctcattccagaaggtcttcaagaagaaaatgttgtggtgataacaaacataactgattataatctattctgtgaaaaaagcttatgaaacagtagatgtgtgtatctagtacataagagctgaatgtcaatatatatatagatatatacacacactcaaataaataatagttatctctaactagagaaattctagttgccttatattttcttctttttccttactatattttctacaataaacatgtgtttttaacaagaaaagtcttttctggtgtgctttttaattttctttgtttaagtgagagtgaggctacataactacatggctaggtagacttttagaaaacttggctgctctagaaaattgacatatcctgatttcttccatagcttggatcttgacctagagggaaatataaaagtgttgacttgaacctgaggggtgccattttcactgctgaagtagtttcatggatcatgaattggagaaatgacttcagcaacatgggtgttaaaatcagaaagcacaagtgacccacaacagatgatggagaacaaagagcaagctgggaaagcagtggcctttaatacagaaaagaagaagtatagccacaataaatattaggcagacagcagttcagcagtttatactattaagctgttgtttaggggaatagtaaactgacatgacccttgaggtaggtatatataggtaaattctatgtgtcccttgaaataggtgtatgacacaacttctggcatctacatggatttggtcactctaaagtagccatgaggcttaagatagttcagctgtttggggataagttaaatcatttgccattgtctttctgcaatttgcatatcctacagttatcattgccattactgaatggcacagagaaaaattctggtctaaagtggttctcaaacctggttgctggagggccaccctcagtgatgatgatttaatctgtagaagaatagaacattgatagtttttatatatctccaggtaattttaatatataactggggtgagaatcattgacataattgtaacaggataatattcaggaaatatggagataaataattttcttctcgacattaaaaaaatctaataaaaagttttatgttttcccctaactcagggtcatcagccttcaagcttcagtctctgtgtgttcacaggtgctgtaaacacacgcatcactactaatatcccacttcagtgctattgctgctcccaaaactccaggtatttttaaccttataaacctccagaataatgagaccactgggttcagtaaattgctttgttttgaagcactattagacaaagtgggagactagaagataaatctgtcaatgacatgtcctttaagactacttagattttgttgaatttgtggatcattccttacttgagcaaatggtaaattaactctctcttttctctctctctctagctggcacactttttccagtagccattctacttggtatgcttacttatcagctgtcctccaggggcctcacattagatgtttctctgactaaccaaacatgacacacagctgaagtcagaaaaaccagattgataatttcactcaaactattttccttcattctaacaatttactggagtacacaattgtgactatttttagccataggaactcatagaaagaccaacttcattagacctacaaaatcgaattgtgtaacagtatatgcagtatgtgtaggaataaaaagcatttctcaaatatgcagtactggattttgcaaaagcaccttacacttagctataaaggagtggaaaacacaaagatgagtaactgcacttttcaaaagactagagctataccaataatacaaaggtgtaaacaaataatgatgagatgacaaaggctgagtgttttctatttggaagctatgttgttgagttatttatgtatataatttcatgcaatcttcatgttatggggatgttctaatccactgtgactctgtccttaaataaaagggagatttggacatagagagaggcacacggggaggatgccatatgagaattgacactgtgctgtcacaagccaaggaactactggaaggagagaaagaggactggaacagttccttccttagcaccttttcaggcagcctagccctgccagcttcttgatctggacttctcacctctagaattgtgaggcaataaatctctgttgcttaagttacccagtttgtggtaccttattacaggagccctaggaaaataattcattatataatctgctaaggtagatatgatcattgtctccaatttccatatgaagaaactatgcctcaggcattgtgtcagttgtccaaaatcatacattcctgactcacttcaatgaattcttcattcagcaaaatttttaaggtaccttaaaaaaattatgttaactcttagggccttgctttaaagcttcaatgggcttttcctttgcaaagaataaaatcctaatacttaagcatagctctctttcctggctatgtttctgacatcctcttgtaccatgctcctccttaatcattctgaggttacatcttaagtcctttccccttgccattcccacttcttggaatactttcccatcaactcttcaaagaactgccttctttaagtatttggtctcagttccaatgtcacttccctgtaaaagcttcctggccatcaagccttctttacacactctattttattttttcatggttcctataacaacctaatatattctcaattgattaactgttttgctgaatactgccttccataagaatggaaagaaaacatggccaggtgcagtggctcacacctgtaatcccaccacttcaggaggctgaggcaacatggcaaaaccttctcttcaaaaaattttttaaaagttagctggatgttgtggaggcaagaggatcacttgaggatcacttgagtccatgaggtcaaggctgcagtgagtcatgtttgcaccactgcactctagcctaggtgacagagctagtcactatcaaaaaaaaaaaaaaaagaatggagagaatgctacatgagagaaaggatcttatctatcatgttcacctcccaagaggtgaacatatcccccaaagcctgatagagagaagatgctcattaatatttaatgcatgaccatgtgcagacttgggaggaaaaatatgcctcagcctatcaatattggatccttaataaacaaggatgtttctgcatcatttccccacaacaccgaacaagtgtggctcactgtggatgtttaagcaaatgcattgtttttccagttatatatctggtagagatgaggccattgataggaatgggaagacgatctccttttattttgatgacccagcatggctgaacactcagtgactaccactgcactttgttgtactttcagcattagagatgccagccctgtaggatataaaacaggaacatctagtcctcaattatattcagaattactcaagtcttagaagcaccacttgtcttttttcaagggagagaaatgctcaagtgatgggctgaagtgaagggagggagtcactcacttgaacggttcccttaggctgtgtggatgcaaacagcattagacaatgacactgacagtgggaaatgcactggagacgatgactggcaaagccctccttttctccccatccactatagatactgacagcaaagggtttgtcacaatgacaactatacactcccaatatcacagaagaaggaggaataaaagggtatattatgagtgactgaagtttagaataaattaataaatattatgtccctcatccatagaaaccacaaaggtctagtaaggctaaggatataacaagaaaataatatgaatatttgcttccccttcctagtgtaatagagtaagttacaaatggcttcaggaaggggagagaggaagaagagtggatgagatacgtaagagtgcttgagggctaattttatgaaagctttgggaagttttaagaaaaagaaaagctatttttcaaggtacatgtgtgtatgcgtgtgtgtgtgtgtgtgtgtgtgtgtgtgtgtgtgtgtgaaagacagaagaaagagggagaccttagaagactatgagacactaagagaaaaattaaggtaaaaaagacacacacttagaaaaacacacatagggaggagggaggaggttaagacattttactatgtgctgtgaatggaaactacaaaccatttttgatatatgcaatatatatacatatatacacacatatacatatgtatttaaatatttaaattacattttctctttttttagagatatggtttcactatgtcactctgcccaggctgcagtacagtggttgttcacagtcatgatcatagcacattatagccttgaactcctgggctcaagcaaccctcctgtattagtctccccagtagttgggattactagcatatgccaccatgtccacctttatgctttttaaagtgaaaaaccatactaagaatgaggcagctcaacttaataataaaaacatttcaaatgtaaagaaatttacaaaagaaaaacaatcaaccccattaaaattgggcaaagggaatgaacagacacttttcaaaagaatacatgcatgcagccaacaaacatacaaaaaaaaagttcaacatcactgatcattagagaaatgcaaatcaaaaccataatgagataccatctcacaccagtcagaatagctatcattaaaaagtcaaaaaataacagatgctagtgaggctatggagaaaagggaatgcttatacactgttgttgggtgtgcaaatcagttcaatcattgtgcaaggaaagtgattcctcaaagagctaaaagcagagctaccattcgacccagtaatcccactactgggtatatacccagatgaatataaaccattctaccataaagacacatgcatacaaatgttcattgcagcactgttcacaatagcaaaagtatgggatcaacctaaatgcccatcaatgacagattggataaagaaaatgtggtacatatacaccatggaatactatgccgccattaaaaaatgatatcatgtcttttgctggaatatggatggaccttctattatccttagcaaactaatgcaggaacagaaaaccaaatacagcatactctcagttataagtgggagctaaatgatgagaactcatgaacacaaagaataaaacagacactggggtctacttgagggtggagggtgagaaaaggaagagaaacagaaaagataactattgggtactaggtttaatacctgggtgatgaaatgatctgtacaataaccccctgtgacaccagtctacctatgtaacaaatgcccctaaacttaaaataaaagttaaaaaaaaaagaaaattaaaatctccttatcatctacctggtaatatgaaaaacacatatctttcattcattcctttcaactgatgaggaaactgaggcattgggagttagtaaaagtccacattgagatatgagacccaccactggctggacacagtggctcacacctgtaatcccagcactttgggaggccgatgctggtggatcacctaaggtcaggagttcgggaccaggctggccaacatggtgaaacccccatctctactaaaaatacaaaaattagctgggtgtggtggcaggcacctgtaataccagctactagggaggctgaggcaggagaatcgcttgaacccaggaggtggagtttacagtgagccaaaatcatgccattgcactccagcctgggcaacaagagcaagactctgtcggggaaaaaaaaaaacaaaaaaaaccaccaccatcattttgcaagtgttaccactattgtgtgttaatattgtagaagtattcctaattatgatttctttgtattcctaattgtaatagctttgtatttgaaaaattattgattcatactctatgttattattttgtatgcgatgacaacagaatatattatcatgctccttttgtgaatctcattcataatataaagtataaatttgtgattttgctttaatttgaaatattaatttcaaatatgttatcacaatttgatacaaactattgacagtaaatctgtggattaagtaatgtcttagtaggtattgggaaaatttgaaactagtaacatggaggactattgtcattgtttatttcaaagccagttaaaattctgcaaagcagtgtacataaaaataatttcaagaaatttataaaataccgagattacggtgtataaacaactttagattctttgtttaagaaattctgccagtttgtaatatatgcttcattcaaagtagctaagggctgtacctggctaatagtaggcacctaatatttgttgaaaaggaatactgagtagctgggacctcctgagtagctgggaccacacacatttaacctgtatttataaaattactgtttagagaataacatttgatggaatcatgcttttactttctgcttacgactcaattgtttgtactgacattaacatcccaaatccttagcatggcctacaaggccctgagcaatgtggcacctgctgaagcctgctgcctcatttaataactctttgtctctttcccagatccagccactctaacattttttagctcctggaccaagacaagctcttcccagaacctgacctttgtacctgttctttattcctggagtatttttcccctgacaaattacttatcatctatcataattcaggttaaatggcactaactcagggaaggcttccctaactgcctcccttctccaaccaaattaggaacaattatatggccacatagtatcgaatcaagtttataattttaaaataattgggagattttgttgtttaacacttgttttcactataagactgtaattacatgcaagtaagaaccatgcctgtttgttcactcctgccacagtcagaatagtgcctggaatatgcagtaagggctgaacaaacactaaataaatgaacaagtgaataaatggatattgtctcatttttagaacagagtactaaatggatcatgaacactatctggtatgtcacgtaggtaatttacaagggctacaatttcagctcagatttaccttttcctggatacaggtcttgataggtctcttgatgtcatttcacttcagattcttctttagaaaacttggacaatagcatttgctgtcttgtccaaattgttactaagaatcaagagagatatctgacatgaaatgacattggaaaacattaaacacgattgaaataatgctagccaatatggttattattagaaaccaattacattttcaacttaaaaatagtaatacttattgcagactcaaatgtgcttattctaaaacaagtaaatgtttgcctatggtctgagattctaatccacggagttcattctaatccacattcaacactatcatgtaccagtgggcctcataacccacctagccctgtgatttttcaggttcacttttctaaacttgtgaattaaatatttattttcttagttcagaagaggaaaaaaactcttgtaattgttgcccatttcaggagaaatcttgcatatgaaaacaagagataaatatacacaactgagggctgtggtttaaacaaaatcttgagaatgttttttgaccttatacatttgtgctttagtataacaaaatgatatagacaaaggtaacttttaatagaaccagtcactacattaaaaaaatgacaaattcttctgcttagctaagcaacagagaaggtaaaatactaattcaattcatcaatttaagcaatactcattaagagccaagtatgtgctcactgaataagctgctaaggtttggtggttacagagtgtgcg

SEQ ID NO: 45317 - DNA, 7769 bp, Homo sapien
cgtttgtatatgataagagagccagagtacaatttaggagaagaaattgtatggaaggaaggttcatttccattagaccagaaaagacagcacatttgaaggcctgaataagaaatattctggataagatattgtggctgctaccagaatggctcttgatgatctctacctcttggtatttatacccttatataatctctttcctatagtgtaagctggtcccaggtacttgtttctattgaatagaatagaacaaaagaaatgagatgccacttctgagattagtttataagatactgtgaatttcatcttgtgccctctccctctctctctttctcttgccctctcatttgaatgaagccaactggcatgctgtcagtggcacagtgtaagtcctgttacaagaaattgacgattacctgtagccaaccctaagtgaagaactgaggtcctcagtcctacaaatggagagaaactgaatctagctaagaaccatgtgagtgagctgggaagaagatccaccctcagttgaaatttaagatgacatattgagcagacatactgagacacactgaaagtaagagagcaggaggaaacaaaaccagggtcatacaaagaacacaactgattttgagattctcacataagtattacaccttcagtgagcacgtgtactagaaatttaaaaaataaataaaataaaccttcaaagtgagctagcaaataaatttccctatggtctcagctctgagtggagagagaaaatgttccctgtggagtttatagccagaatccagctctcaaacaggtttcagcctgaactcacacaatctgtgtggcttccaaatttgcaagctgagaatttaattcaaagtggtctcaggttgatagcagtccaaaatgctaggtaggaaaaaaaatcctctctggacaaataaatcatcaaagcaagctcataagagcaggtttcaaaggtcatgagcttctaacacacacacacaaaaatcacacacacaaaatgggggtagcagcaacatgggtagcgtattcaaacttgaaaagactttaaatatttgtattattagatgtagattatgaaacacatattttaatgtggttaatttttttaaggaatcacaactatgagtaaagaccaagaaaattgtgctggatggccacttccaccatggctcccctcctatttaagtctgggtactgtgtcacccgaagtcttcaggcacattgttccaggtctgggtttgcctatgaaagaaactcatgagagctggaaatgaggagtgaagaggaggtcttcacataaagcaggcttaaggattagacatagcaggtttgacagatgtgatggcttgcagaatcctttatgagctcccactgtccatctggataagatttacagacctttcagaaattcctataagcttgggttctgtgcccacactctagactgtcaggctaagatctctgatataaaacagacctcttctgattttgtctagctgcttttctaatatctattcaccaagctcttccaataatagcataaggccctaattaatattaaacttttatcattataatacataggatgtcttctgttttcctgatcaaattctgactactattaaaatataaagaattgtccagaaatatataaaaaaagaatcacacattgatcttctttaaatgaaaatataacaattgtatggactaggatgattacagttgttcagttctgactgttatttgaagaaaaaagcaataagaagcctcagcaacttaacagaaggagctgccatttactaggagaaaagattgtggatgagagtgtagcaaaggtcagaattctgtgaagcttgagatgtttattataatgaattatcttttatactcactacaatttcctaacaattttggggtttatatttttgaaagagatatacctttaattttctttctttgtactattgttaggtaactttaatgtgcagattatactacagtgaaagttgccaatgacaaggcaaagtcacttacatcagacccaaagcaaagtggagccgggtcatgaaaaaggggatcttgtgtgtctgtccacgataagcactatcacaaggactttctataaactcacaagaaatttctgcccacccagcacacagtttgtccagctcatcctgtaggtgtctctataataggacctatcataaaaaattcctcaagactgcagcatttcagataagccaccctcacaagaacacttgcctagcaatggctgtttctgccagtaagttaacaccagctcctgcatcagaccctgtgaccaatgatgtttgtttcaaaacagcttgcatggacttctttttgtctttacatattttccttacctcaacctcttgggatgcacctatgattgatcatagcacaaatatctcagattataatccttgtttatttccaaataaatttatttctttggagatccactttttctgttattatacattgacattgttattatgaaattggttgggtgatgtgtcttattttcttgtctccagaagaatttctgtaacagtgcaattaaacgttctttgcatgtttgctagaactcacctgtaaaattgtctgagcaaccaaagcctggtttttgtgtttagtttttcttttgtgattggggaggggggtttatcgtactgattcaaggtgtgaaggtaacatcattttgattttatacatcttcttcagtccatttaagcatgttacatagcgttgtttgttcttttcatgatattctttacagtagtctcctaaatgttccctctgattctgccatgagcccctacaatctatttcaactcagaagctatagagtttgtttaaaacatgtaacatattatgccacctttcttactgtaaaacatcccatggtttctcatagtatttatagtaaaagtgaaatttttatgatggcctgagaaacttttcccattagatgcccaagtgctggtctggtctgatcttctcatcttcccttgggtgattctgtggcagtcacactagcctccttgctgctccacaaaaactccagcatgatcctacttcaggatatttgccattgttactgcatctgcctggaaccttttctcccatataaacatagagattgctcttgcctgtccttcaagtctattcttaaatgtcccattctctgtgaagctttcctgcccaccctatttaaattacagacttcactcccaattccccatctactttaagagtcttcatttatcattccttgacaaactgtaaatatacatgttcacttttttatcgtctgtctccaaatactggaatgttaagttctgtaatgtcagatatttctgtttggttcactggtgtattcttaaagcatgttacatactaggtatactcaatgaatatttgttgaataaatatcacattgggcttattccagaaattcaagcttgtttcaatagttagagcaatctacaaatgtaattcattacattaactaattaaaggagctaaatcacatcaccaccacaataatgcagaaaaccacatttgatacaactcaatattcatgtctgcctaacaaacatctcatgatactaggaaaagaggaagggatatattattttcatgtataaagcactaaccattgtagcatgccaatatactcaaaattcaatgaaattcctatcaaaatcttagcattcctcttagtcctcaacaaagcatttctaaaatgtgtatagaagaccaaagggccaaaagagtcaacttctgaagaagcgcaaaaagaaagttgaggaaatcttaaaacatgttattgagcttaaagttgcaaaaataaactcatgtaccataattcatgagtagaaaaatagactagtggaataacataaaaataaaaacaatgcttacataaaatgttgtaactgatttggatgtcattagaaatcagtaagtaaatagatggacaatgtaatgaaagatgctaggcaaataatgtggtagggagaataatggccctcaaagatgcccatgcctaaccctggaacctgtgaatatgttacactgaatgcaataaaggcttatcagatgtgattaaggatgcaaaccgagatggagagatcttcctgggttacccagatgggcccagtctaatcacatgagttcttaaaaatggagaacctttcttagctgagtccagagagagatgtgacaatgaaagaatggtcagagaaatgtgacattgccagctttaaaaagagagaggagaggcaatgagaaaaggaatgctgatgttctctagaagatagaaaaggccaggatatggattctaccctagccaccataaagaaacatgcctgtcgacaacttgattttagttcactaaaattcatgcctgatttctgacttgtgtacactgtaagatgacaagtttgtgttattttaggtcacttagtttgtagaaatttgttacagcagtaatagaacaagtggttatccatatgaggcaaattagattggatacctatctccaatagaaatcaattcaaggtgaattccaggaaaatacttaaaacatttagattaaaaataaatgagaatttttgttacttttggtaggtcatagaaccaagaaaaacaaacattaaggaggaaaaatgaacatatgactacatcaaaatataaagcttctctatttggaagatatcataaggtgacaaatcataaactgtaatatttacaacatatatataagtgaataaatatacatttagaatatatatgaactcccaaaaatcaacaggaaaaataagacatagaacaagcaaaatgcataaacaaaagaaggcaaaacaaaaataatgactcataattatatgaaaagaagctcatcttcatagatgagcagataaatgcaaattaaaaccaccctgagatgctttttacatccatgagcctgataaaagttagagtctaaaagtaataacaaagatgggaagtaatagaaaatcttgtccattactggttaaagtataaactgatacagctactttatagaatattacattatagaataaagttgtgagtatgtatatgcagtgactcagcatattcattgctagtatgtactcaagagaaacttacaggagtggactaggaagtaaatacaaaatgattacaacattgtttgttatatcaaaaaataaaaaagacacccaattttccagcaaaaaaaataagtaaaaataaatcctggtgtattctaacaatggaataatatatagccattaaaataaatcaactattactgtacatatgaatgtaaatatcagcaaaacatattgtttagtgaaaaactaagaagctgaagaagaatatatacaatatggttacatttatatgaagtccaaaaacttgcaaaataaagaaatgtatttagaaatagattcacatgtgagaaaactagaagaaaattaatgaaaggataagagggatagcagtaattctgagtagttgagggaatttcaattggaaaaaaataatatcatattctttaagtcaggtagtgggtattagcatttgttttaccatcgttctttattcttatagctacactatatattttcaatgtatttaatgtattttttgcataattaaatattatgcaataaaaatgagaaaacaaaaaagtagaaaatgataaattacaataaagaaatggagaaaaaattataatctagttgagtaatggtatattacatagctattttcttaagtagatgtatgtacatgatgtatgcacgattgtacatacatgttcttaattatatataaatatatatgtacatatttttaatataaaatactaaacaaagtacaccaaaatattagctcctatgttagtgagataatgttttgtttttttgtattttaagttttacatagtaggtgtatttttctgttttcatactgctataaagaactgcccaagactgggtaatttataaaggaaagaagtttaattggctcaccgttcagcacagcttgggaggcctcaggaaatctacaatcatggcggaagacaaagaggaagcaagccagcttcttcgcaaggcagcatgaagaagtgccgagcaaaggggaaagaatcccttataaaaccatcaaatctcgtgagaactcactatcacaagaacagcacaggggaaactgcccccatgattcaattacctccacctggtctctcccttgacctgtggggattatggggactatggggattacaattcaagatgagattcaggtggggatacaaagcctaaccatatcagtaggcatgtattgaattttaaactcagagaaaaatactagtgtttttataggattcttactaaagaaaaaccagaaagtaataaaccatctacgctaagacataaaattcagttgtttagttacaagatagaatgtggccttgtaagaaagcaaattaacttctaacatacaaagccttagagaagattcaagtgactgacggatcttaaacagagctattattacaactcgaactgcagtaaaatatcctcagcaacatagatgtgtgtgtttcactagtcagagcaatacaaatttaatgaaactccactggtggtgtttttaatcagacaatttctgaagatgtcctggcttattcacagatgcaagccaaatctctagaagagtaccataataagaaaaaaaagaatacaggcaattgagagctgttccaaagtttagggagtttttgtaaggaattaataaataaaaatgttcttgaaagacagaaattaatatgcagttcatactgtcagaattgcaggcaatttatcaaagtcccctaatcctccaaaatcgctattttttttttgacacacactttacagtacagaagaaaatgtctccggcaataaatcacaaagttaaaattacctagtctacaattaactacacagtgatggtaaatcattttctaccaaaagaaagaaatgtcttgtctattcaggttctgctctacttaaaagttttccttgttggcgagcaagtggttagaaaattatattttatacgtacattcagcttaactatcattcagctcaggaagatgactcagggccttatccataccttcaagtttgctcttagcaagtaattgtttcagtatctatatcaaaaatggcttaagcctgcaacatgtttctgaatgattaacaaggtgatagtcagttcttcattgaatcctggatgctttatttttcttaataagaggaattcatatggatcagctagaaaaaaattaagaggaaaatcacatggaaagttatatattatatatctattatatataatatatatctattacatattatatattgtatatctattacatatatattatatatgtattatatatattatatattatatatgtattatatatattatatattatatatctattatatatataatattatatattatatatcatttccaaattccccagcgttcatatttgtcagtgcaagtaaagagccttactgctgatgaggtttgaggtatgaccatttggccagaatttatgaactctacatgtcgcttgatgtgtgcctcagggtatactttttttttttttttgagacggagtcttgctctgtcgcccaggctggagtgcagcg

SEQ ID NO: 45318 - DNA, 7763 bp, Homo sapien
cgcaagcagcccttcacgccctcctcccagtacaaagctaattgacttgtgagaaatgttaagcttggaagagtcagcatcactgcacttattttttattctactctgacattagaataatccttgagtgggggaaaggttaaaaacccccctggataagtgttactaattaatgatgattgttttaaacaatgtttggataatttttccttgtcccttgacataaacttgataaataactgagaagtgagaaggagattagtgggttgattaaattccattcaggtacttaaagttagctccaaaaatttagctatttgtaaattgtcatgcattgttaatgtataagagatgtagatttcatttatctttggtggagcgagatgaagcagtgaatcattgaagactgaaagaaagaaaaaggtcttttcccttttctttaagaagcatcattagttaaaaacatgttagttgataccagagaactatatttaaagggacagcaataagcaaattgattactctggtgattattggagtgacattgccttttagttgtactttcacaaaaattcacaatatttgccaaagtcaagttatccattacactattaatttgtcattcttttgtttatatagtcaatatctctatctcaattggatctatctcaactgcttctaaacaagccaccatagtctctcccatttcaacaatctcttccaagtaccacttcatttcttcttttcatatttttgaaaacttttgaaaaactacctattttcctcctccatttcttgttcattccattctagtggacatggaatctgttcctcctccaaaacggaatttggtaacccttaaattactaaacccaaaacaatatgttgtctttatctttacctctctgtggcatttaatgataagaccactactttcttctcttttacccttctttcttgaattcagtcagacaacgtacttacatttttcgtcttattctccatcttagaaaccacctcagctttctccattcagctataaaattgtgcttttcctcaaagattaatctgcctctcctctcactctatactatctctgttagctaattttatttgtgcacattgcttatactgggcattatatacacatatgcatgtgtgtacatgtgcacacacacactgtatgtggacatgtatatatatatatgtgtgtgtgtatatatatagtatatatataaattacaataacataaaggtggcattttaaattagtggaaattaccctgatttgatcactacacattctatacatgtaaagaaaatatcactctgtatcccaagaatatgtacaattatggtttgtcaaatgaaaaagttcatacattgaaaaattttagataaatatcaaactttctctgaaactgtaactgtaaaatgtaaaaaacagtaattgctatattgcttatttctgagtagaagaatatgagacatttccctaatcattatgtgtaattacaattacatatatatatgtaattgtaattacacataatgattagggaaatgtctcatattctatatatatagacagaaagagagaaaatatatgagggagagaaggaatctttccatctcctttgagttccacggtgttgagagtcaggacaactgcaattgcttcatcatgcctgcttgcaattatagggcttttgaaccatttgttccctccttagatatcctcatttttttcagattcttgcttagaagtcactcctccgtggacctcctctgacatattaaacattgcagtccattataagctgcaagaggacagggatttttgcctgttttattccctactgtatcaccaggggctagagcaatatctgacaaacagtgggcatgtaatgaatatttgttaagtgaagtaataaattcaatcaaatcacatcacctgtttaaagcacttcattggcttcacattgcacttagaataaagagaaattctttttatacaatatacaatatattttatacaatataagttcctgcagaatgcagacactttctacttctccagcctcttttcgactcctctcctactagcttctgtatttaagccatattagacctttcttcagttttttatatagactttgtcgcatcacacctcagagattctgtacatgttcttcctcctgcctagaaaggatcgtccctccacttttgccaactaatccctgctcaacttttcatctcagcaggaggcccattctctttggcaatcctctggcctccagcccatttattatatgctcacatgtcaacatgtacttcgtacagcatgtaacacaattgcacttttatattttaacaaattatatttcccatattgaactgtaagtctcctgaaagcaggaattttgttcttgctcatcatcaactttttcaacatccagtgcaccatttagaacttagatgtagtcaatacaggtttgtggaatgaaagaggaaaagaaagaattaatattcctttaaattaggatggcaaagatcgtatatagaaaattggctaagttgtggtccattcatgtttgctcccaattaaggagcacagctatgaaaaggaaggcttcaaattaataaccaatagatttttttaaaaagaaaactggccaggtactgtggcttatgtctgtaatatcagcatgttgggaggccaaggcaggattacttgagcccagaaattccagaccagcctgagaatttggcaaaactctgtctctacaaaaaatacaaaaattagccaagtttggtggcatgtgcctgtagtaccagctacttgggaggctgaggtggaagaatagcttgagtctgggaggtcaaggctgcaatgagctgtgattgcaccactgcactcaagcctgggtggtagagtaagaccctgtctcaaaaaaaaaaaaaaaaaaagaaaaatcactaagcaaaataagacatgtgaaggatcatgtcaaaggaaagaaaaattaggggaacattaaaagctttcttcccaagccactaaatcaacttgactaacaaaattaccacttgatttagtattagaaaattacattacatatcaaacataaacccattaatcaaatactaaagaaatttctgagttaaatggtataatgttagcttatgccagagctgaccttgaaagattgttcaaatatggctcagtgtgattgaaagttctgtgtgaatatgtttttggaaagatccaacagcaacaccttagtgtatgtttttgaaataaaatatatctgagtagcagcaaagttattctcaaatttccattttatagctggagatgttataccgtgacgtacatgataggacccaatatggatcaatcccttttagaagtcaatcaggaagaggggagcagttaaaacagttgcttggtttacaaacattagaacaattttcttattcacaccatctgattattgtatgttattttttccccaacgtttagactacacaatgagttaagaatgataaaaataagctcaccaatatactatgtacatatttaccaaaatctgtgcatgcttatacatataaacacagctgataatttattagttaggctcatttgtaatttttgtcactatagaccagttttttatttaaattgaagattagtatacattttaaatgattagtcaaaataaaaaatctaaaatgtgctctaaatacctcttaggtcagaaaaaaaaagtcaaaagctagagtatagagaaattaagaaacgccctaaatttctaatctgacaaaaattcatacaagatttaaatattttaatggaaaatagaacagaactaattattgaagaaattatagaaaggaaacaaaataaacagattatatggaggatttttagaagataagtaaataaattaatatactaggaaaaaacaagggaaatatacttgataaataaatacaggtaagagttcttttgaaataatgataaaatagaaaatctctgtcaaaactaaaaggaaagatgcataaatatataaataaacgataaaaaatgttgcatacatatatgactttttcagaatcaaaaaatttaaatttctgtaataaaatttaaatgtttataaatttaaaaaactagaagaaagaatgttgactgttcacaatacaaataaatgacaactatttgaggtgatggatacgctaattatccttatttgatcactgggcattgtatacatgtatcaaaatatcactctgtatcccatgaatatgtacaattatttgtctcaaaaacaaacaaaaaaaagataatgggagaatgttgaaaactcagagagaagagcaactctcacagatagggatccagataacattagcagctgatttctcagcagaaaccttgaaggccagtaggcagtggattatatatttaaaataatgaagaaacctgtcaattgagaaatatatagctggaaaacttatccttcaaaaatgaaggagaaattaagacatttccggatttttttttaaaactgaaaaaaatccatttatccctgaatttgacattcaggaagtgttaagtccttcaggttgaaataaatgaactctaggcaataactatataagtaaataagcaagctgtatgaatatacaaagctctctggtaaaggtaaatacataaacaaacataaaaacagtcctattgtaattttggtttgtaactctgctttttattttctacataatttaaaaggcaaatgcataaaatgtaattgtaaatctgttagctggtatacaatgaataaagatataatttgtcacatcaataacataaaaagagtagagctatatatatagcagtagaattttggtatgtgattgaacttaagttgaaataaattcaaattaaaatgttataactctaggatgttatatgtaattctcatagtaaccaaaaatgaaatatacatagaatataaacaaaaggaaatgagactagaaacaaaatgtgtcactacaaaaaaatcaactaaagataaaaaagaaataattgagaaaatgattggcaaaaatcagtaactctgacgtattaaaactttccatgctacataaatctgaaaactctatttcacataaaactggagctgaaagaaacaaatatttacctataaagttaaaagttatatagggaacaaacactaattttttttagaaaaaattataaaaagagtaaaaatatgccttatactaccgtaatttcatgttttacagctctgggaaaatagaaaataaaatgttctgttagcatgaatccctctgtgcccccaaaaaaccctatggattgcatcattattacctaaaaagtctattctcaaatgcagcagagtgatattttttacaaggtagatattaattttagatatggaataatattggtgatttcaattttataacactgggttaagatgaaagaatgagaagataaaggtccctcagcaatataactcacaaacatgttcagaagcagtaagaagttacattaattatcttttgaaagtcgataatctacatctttaatgtatgcatatagcatagctaatgtactatccctgggtccatttattcaatgaataattgccgctatgtgtcagacatttttctaggcctaggaatggatacataagtgaacaaagcaaagattctggttcttgtagagtttccattaaaagacaatttagtaaaacttttcttcccccaaattataaaatctgtaagatgatttaacaacatgtgtaaaagtcattgtgggccaggcacggtggctcataccaggtgtggtgactcatagcactctgtcacccaggatggagtgcagtggcacaatctctgctcactgcaacctctgcctcctgggtacaagcgattctcctgcctcagctttctgagtagcaaggactacaggtgcacaccatcacgcctggctaatttttgtactattagtacagacggagtttcaccatgttggccaggctggtctcgaactcctgacctcaaatgatccatctacctcggcctcccaaagtgctggaattacagatgtgagccacaatgcccggccttattttctacaactttggtaactttagcatataccccaaatctgtaagacataatattataattcaaatgcaactcatggcttctctttgtactctttctctagcttttgaattatttattctaataccagttttaattctgacacaaaatcatgggagttctaatcaaaatccaaccttttatcataaaaactatgaagaaattatgagtagaatttaaaaaggaaaataggcctattaattagatttgtctttgtagcatttaactctataataaataatattttatgcctatgagtccccaacaaagcctccagcttctatttagatataaactgtaaaagtcactactggatccacaagcaagactatggtaaataaatttctccacctaaccagcttcttttacatgatgttacatgtttcttttgttttttcattttggcaaatattgattgtcatcttcgtgtttgtctatgtcctaagtgctgggatacagaatctgaaaagatggacacaggacctgccttcaagttcacccccttttttttttttttttgagatgcagttttgctcttgtcacccaggctggagtgtactggtgagatctctgctcactgcaacctccaccttcagggttcaagtgattctcctgcctcagcctcccaagtagctgtgattacaggtcccagccaccacgcctagctaatttttgtatttttagtagagacagcgtttcatcatgctggtcaggctggtctcgaactcctaacctcaggtagtcgacccacctcggcctcccacagtgctgagattacaggcatgagccaccacgccctgctaggagttcacgctttagttggggaaaatatacaataagcaagccagtttttaaaatgagaactgcaattagagttaaatgctacaaagacaaactcacaggaagatgggatgtagaatgataaggctctcagaatagtaagagaaactattgcttcttacgatgtttgtctttctttgtatcggtgctcagctgagtctgcagtgcttcagaggcagctttcattttataaaaatctatgatttctccttccagtttttttttctcttcctcgagcttccttatctcctcctgttgaatcattttaagatgctcgaacttgtcctgcagctgtgaaaccaatgtgcagttgtgacaccaaagcagtgtggctgaacacctaaaagaatacgctttttttctgattatcaaacaaacccaaatcatcacagtagaccacgatcttaataacaatctcaaaaactcaggagtaaacactcagatatggaatttttcttttctttcttttttccttttataagatggagtctcactctgttgcccaggctggagtgcactggtgcgatctcagctcactgcaacctccatctcccagttcaagtgattctcctgcctcagcctcttgagtagctgggactataggcatgcaccaccactacaggcgtgtgccaccacacctggctaatttttgtatttttagtagagatggggttttgccatgatggccaggctggtctcgaactcctgacctcaggtgatcctcc

SEQ ID NO: 45319 - DNA, 2630 bp, Homo sapien
gctccatggctcaggggttggggacccctgctcaagtgcatccaaaacgacccttcccacaccagtcttcacagtggtcaagggcagcaaccacttagctcccaaggcatgtgcctcagctggcatttcgtcacaatcaacagtaagtggtagcttgagtcactgtgaggtcacctactggaaatcaccagcatcccatttcccactggcaaagagctcagcactgccccctgggaaaccaaacctatgcccaaatcccatctgtgtgggtttacctcctgggacccttcctaacatataaccttcataacatacttgagaggctgaggtgagacaatcgatttagcccaggagtttgagatcagcctggacgacataactaaatctcatctctacaaggacgaggtgggaggatcacttgagcccaggaatttgtggccagcctgggcaacaaaagaagaccccatctggccaacatggccaacctggccaccacggtgaaactctgactctacaaaaatgatctgggcatgggtgacatgcgtgtgtagtcctagctacttgggaggttgagatgggaggattgcttgatctcagaaggccaaagctatagtgagctatgatcacatcactgcactccagcctggatggcacaggaagattctgtctcaaaaaaaagaaaagaaatatatatttaatctctgtccctggttcctggcacagagcttctaaagctcttacaaagacctcagtgatagatgtgacaggagcatcttttgttttaatatttggtcttggtcccaggtttctaacacaagagcctctaagaactttgggatctccagcatggtaagaatgcatttggggatgttgttgagatgactgggtgactgcaagctcctaaatttcttcaagaggagggctgattaccatgcaaccacatggtaagaggcttggaactttcagcctcatgcactgaactccagggggaagaggggctggagactgacttaatcaccaacagccaaaggttttatcaatcatgcttgcataataaagcctccataaacaccctgaaaggggtttgcagagctttcagggttgctggacacaggagatgctgggagggtcgcatgttcaacagagggcatgggagctctgtgcccctccgaacttaacttgccctgggtatctttcttttttttgagacaggatcaggctcttttgtccaagctggagtgcagtggcacaatctcagcttactgtaacctaagcctccccagtccccagctcaaggtatcctctcatctcagcttccctagtagttggaactctaggtgcacaacaccacaccagttattattattattttttaattttttatagagacaggttttcaccatgttgcccaggctggtctcaaactcctgagtttaagcgatcctcccaccttggcctcccaaagtgctgagattacaggcatgagccactgcatccagcatgcacgtctctttcattgactgtttctgagatgtatccttcacaatgaaccagtaataggaaatgaactggccagatgtggtggctcacatctgtaatcccagcactttcagaggctgaggtgggaggatcacttgagaccaggaatttgtggccagcctggccaacacaacaagaccccatctatacaaaaaataaaagaaactagccagatgtggtggtgcaggcatgtagtctcagctactagggaggctgaggtgggagaaccactggaacccagacaatcaaggctgcaatgagctatgactgcaccattgcacaccagcctgggcaacaaaataagaccctctctctcagaaaaaaagaaaataaactgtttttctgagttccgtaaactgttctagcaaattattaaacccaagaagacagttacgggaacccccgattggtaacaggttggtcaaaagtatggtgacaacttaggacttgccattgtcatctgaagtgaggatggcctcgtgggactgagcccctaacttgtggggtctgtgctaactccaggtagtgtcagaataaagtcatgggatacccagttaatatccagagcactgaagaatctggtgtagaaactccatacgtacattcagtcggaagtgtgtgagtagagacaaacatgggcttttctgtcacctacctgcttaactgcataggagaggcaatatgtggtgctcatgaacaaagcaaacattaaagtcagaccagacccaacatttgactcagtcttaatatccaggtgagcctgcgcaaatcattcattattcctaaggttttcatcactccattcataaaatggggataactgtggcacctacatgtgattctgtgagaattaacgaaatattatgcttggggttattgtgatcattatacctgttccaaactatttgacaaggacagtgatggatgaagacatcaaaaaatcagaaactgcaatgaggtctctcaggcaaaattccatacaagcaaattactgtgtctacaaagcattcctgccacacttaattcaccattccctgaacagaatatgccatcttcgttgttcaggtctgtacagtgctggtttcccttcc

SEQ ID NO: 45320 - DNA, 2274 bp, Homo sapien
cgtgtgatgtctcccctggacatccagctttaaaatttctctcttttgtactctttccctttatttctcagactggctgacactcagggaaaatagaaaagaacctacatgaaatatcaggggtgaatttcccccgatatcacactggctcttctctcacctgtctacctgcttaacttaataggagaggcaatgcatggtgctcatgaacaaggcaagcattaaagtcagaccagactaacatttgactcagtcctaatattcaggtgagcttgggcaaatcgctcattaaccccaagtcttcatcattttgtgcatataatggggataactgtggcacccacctgtttttgtgagaatcaatgaaatattatgcttgatgttattgtgatcatgatactatctgacaagggcagtgatgcatgataacatcaaaaaattagaaactgtaatgaggtctcttgggcaaaattccatacaggcaaattactgtctctacaaagcatttctgccacacttaattcaccataccctgaacaaaatgtgccatcttcattgttcaggtctgtatagtgctggtttccctgcctgggcagctcactccatcccatcccagcccaatccccatccctccacctcccccttccctccccactctcatacaactcttccttatcttacaggacttggcttcaatgtcaccttaactggaagcttctctccctctccagaagagcttccgattgcacttgatgcatgcactattatttgatcatttttgagttacagtccaagtctttttgtacctgaataacatgttgcccagtcagtttctcttcctggattcagaagtctttcatggtaggtccagctagaagtgacaaaaagacatttaaaaaaaaaaaaaaagagggatgacacagacagacatcagcacttaaaagttttaaacgatatgtgaaaaacaaaatttaagggcttctaggagaaatgtaggagggaaggtgttactgggaaatatgatagaaggttaatttttattttattttatttttagagaaagggtcttgctctatcacctaggctggactgcagtggtgcaatcacagttaactgcagcctcaacctccagggcttgagcaatattcccatctaatttttattttgtttaagaaatgcagtcttgctcttagcaaagctaaagtgcaatggtgtgatcatagcttactgcagcctcaaccttctagactcaagtgatcctccagtcttagcctccccagtagctcggactacaggtgtgcactgcaacgtgtagctcattttttttttttaatttttagtagagacaaagtgtcactatgttgaccaggttggtggtgatctcctacactcaggcagttctctcacctcagccttccaaaatgctgggattacaggtgtgagctgccacacctggctgagggggttaatttttaattatataaagagctcaaagcaaatattagaaggagcctaaatgcctccagcagttgactggtactggtaaattgtgatacatccatataataaaatattatgcaaccatgaaaaggattaagatagatcaataggtattggcacaaatgtccacgaaatatgaaaatatgaagtgatgttcaatcaccatgtacgtatcttgaaggatatggcccattttctcaactgcaattatttcctgagataagattatgggtctaaagagtgaaggacatttttcacttatttaaaagtatttatcatttttataatttaataaaagattaaacagatcattgaattagtaaaagacaaagtaactctataaataaatggaaaagacacagataccccaggcatggtggctcatgcttataataccagtactttgggagggggtggtggggggattgcttgaggccaggagttccagaccagcctaagaaacaaagcaagacctcctctctagtaaaaataaaaaaataaaaataattggccaggcatagtggcatgtgcctatagtcccaactactgaggtggaaggatcacctgagcctaggaggtcaaggctgcagtgagttgagactgtgccactacactgaagcctaggagacagagcgagacttcatctcaaaaaaaaaaaaaaggacaataaagaaataaagctaataagctaacataaggaaagataaaatatgtgacaaataggctgggcacatggctcacagctgtaatcaagcactttgggaggccaaggcg

SEQ ID NO: 45321 - DNA, 2074 bp, Homo sapien
cgtttctactaaaaatacaaaaattaaccaggcatggtggcatatgcctgtaatcccagctaataggaggtctttcatttatcacacagaaaataacttgttaaattataatacctgtgtgggcgaaggtgcagtgaaatggccattttcttgtagtattagtggtgtttaaaatgtatataagccttccagcataaagcttggaaattttttttaaatcatacagacagtgactcattatactgcctcctccaactcctggcctcaagcaatcctcccacctcagcctcccaaagtgctggaattacaggctgacagccaccatgcctgaaagctttgcaatttacatcgagggtaataagaatgctcatgccctgtgactcacagtaatctcacttctggaaatttcacctttggatataattcaacctaaacaaaaggtcatatgcacaaacacagtgaaaatctgggagtaatttttttctctttttttaaaaaaatatggaatgcttcacaaatttgcatgtcattctttcacagaggccgtgccaatctctctattgttccaacttaagtatgtgtgctactgaggcaagcatgagtaatttaagatagggtggttaagtgaaataaggaagaattatggagaatttaaaaatctatgctatttataggcacctagtaacagctcagtaaatattagctgctactattattatttttatggtaatttcactcaattaaaaactgtcgttaaaaattgccattgtcatggaacataatgtctcctactgtataattgtagaaacagatacaatttgtcccttggtatatggggggattagttccagctctcccatttctgtgtataccaaaatccacgcatactcaagttttcaaagtcagtcctgtggaatccacatataacacaaatgggaaaattagtgaggtgtggtgacaagcacctgtagtcccagctacttgtgaggctgaggcaggaggattgcttgagcccaggaggttgaggctgcagtgagccataattgcaccactacactccagtctgggcaacagagtgagacagaaggttgactttttaatagaatttttctgttcacttgaagatatggtcaggattgtggcatatgaaaattcttcataaaataactatctaatccaattaatgctggaattgggaacagcagaagtgtcatctcagagctactcgcaatgaaaggtgatgtctggggctcaggtgtgttgaggtccccatgcctggactatgggtgctgagtgggatttacttgtccatccattttctatattccagcactgggaaactagggacagtacttgttctcaagggaatcttcagcttaggtggctctgtaaaagagaaattacatcattgaaaaatcgtcgcaggtcaggtgaggtggctcatacctataatcccagcccactgggagactaaggcaggaggattccgtgaggccaggagttcaagaccagcctgagcaacacagtgaaacctcatctctacaaaaaattagaaaatgaactgggtgcggtaaaacattcgtatagtcccagctactctggaggctgaaataggaggatcgcttgagcccaggaagtggaagctgcagtgagctctgatctcaccactgcactctagccttggtgacagagtgagaccctgtctcaagacacacacaaacacacacacacacacacacacacccccaatctcactctgtccagccttgactaatcaaaagggccttctggttacagaagaggtatgctcttttgtaggacagggagagaccagcaagcttgttcacagacttttcctcatcctctgcttagttttccaagaaccctcacagtggaaatggagtctctgggaaaatgacctaaatctttgggttaccaggggagaaatatgcctcctttgtcaattaataaatggaacatctgccttaaaatccagggagttctgctagaatgaatcactccctaagaccctgaccaatgcatggaacatgaaaaactgaagtttaactgggcg

SEQ ID NO: 45322 - DNA, 4445 bp, Homo sapien
gatcacctgaggtcaaaagttctagatcagcctggccaacatggtgaaaccccgtctctactaaaaatacaaaaattagttgggcatggtggtggacacctgtaatcccagctacttgggaggctgaggcaggaaaatcgcttgaacccggaaggcggaggttgcagttacttctagaagaatttccattagccctttgaaatccttcaacattcatgaaggccaaagagttttcacctaatttaatctgatgggtatgtgaccagagtctttctagggaatagagactcccaaacagttcgactgggaagtgaggagagaatttattactcaaaaccaaagggaaatgaaaagaggccaacatagaatgtcattattctttcttggcggggaatggattccagagtcattctgtgacctttacatgacctccttattagcatctaaaagcttccagtgtaggatgcagccagctaggttctcttctaatgtaataaaatttgcttcggcaaatcttatgcagagccatctccaggctccagaaacaataggctataaattactggatctcccatttgatacaatgaagtatgagcatggtcctgaatgactcctctacatactactctgggtggcttgaagtgaatttgatacaagaactggagcgagggcaaagcagagctagatctaggattaatgtgcttgggcccagctcctcactactcacctatgagtctagttccagaacccaagtagaggatggggaaacaaggctcctgactttttttccctaatatctgcatctctttcacatttcttatctccttgcaaagaaactaaacaggctcaactgaaataactaaatgattaaaccctatacagagaatctccaaagactgacaaaatatcattcaagactgttacacagacaaccttgaggatgacttgatgtaccagtgatctacaatatttgggatcattccaaattcccatcaaggatctgcctatatcaacaaaggagccaaggaccaaccattcaaatgggccctgctgccaagccttttttttttttttttaacaatgccatctcttcatattgttccatttaacaaaactgcagcccttcatctatccttaagtcccttggccagtggtacagagccagagtatgctactccctagcaggaaatcaacaggatgacctactaaacaccattcagaagatgctaagacccatgaattgcaacaggaaagaaaagacagagaattagtcagacaggtacatgctgtgccaaaagtgcactacagcccccacccaattctgcctaatcctagctgggctgacaccaacctgatgagacaggcctataagatctcaaactaaaacagaaactcctgaactgggttctttcgagcccaggaagcagcagtaaatcattaaagaacagataagttcttaaggtgagggagagtttcagataaatggaatgctggtagaacacagggcccaaaggagcaaaagttaacctaagcccaggtagaaccttgtttactagagtattaggcatgggtttgggcaactattctaaccagagaaactggcttcagtgagggcaagttggcaatccaaggtatagcatgcatagggctggcaaaattcagggtgactgaagcaaaagcttcataaccagaaagaccacatctgggggtagagcacaaaactctcaagagatgaatctttgtaagagtgaggcagaactatatagcagttttaggagatctgttggtgcccagcaagagctccaaacgggctatatgcagggatgcaggctgtagtctcaggagaggaggttcacaaaagtcattcagtccaagacctcaaactgtgttctctactaaaaggaatcaaggttccctagagaaatggctgactccatgtatggtgcagtatattgatcctggaacatctgttttgccagaaagcaaggaagccatcaaagtccaacaggatcacttcaaaaagacatgaaagtcaacttgaagagataattattaacctagatgagacaatctaagcatccaaaacaataaagactgcaatggcctgaaatacatcaaatgcaaacaataatctatgagttcataatggtattcagaaaaaaaaactactggtcattagagggaaggttactaggtcactaacttactactctgaaaagtgacttaagatgagaggtagggtggaaaattagctatttattcagtctttcctgtacaaacataaatttttagggagattgaagcagatgaaacaaatctggaaaaatggaggtaactgcttaatctgcgggttgggtgcatggaggttcaacatatttcttttgtgtatatttgaaccccctacaaaaaaagcacaagagagaatgtgagccaagcagcttagggtttaggcaaggcttctgcctacaagagacactaggatatgaggggtagttttagccctaatgggctgagccaactggaggtatatagggaagtgctaaattgcagaggtatcatgttgcccagcacttgatcaaatcctagatcctaggtctgcttggtagcatgcttcctaggtagtggatctgaggctacctatagaacttcctttgcagtcatagttcgctcagaaactacaaaagtgcttgctcttgaaaatggagtctttgtccatttcatgcttctataaaagaataccacagactgcataatttataaaaaggaaaaaaggaaggaaagaaaaaaggaagggaggagggaaggagggaaaaagggaaggagggaaggaaaggaaggaagggaaagaaggaaaggaaggaagggaaagagagaaagagggaaggaggaagggagggaaggagggagggagggagagagagagggagggaggggaagggaagaaaagggaagagaagggaaaggaggaagaaaaggaaaggaaaggaataaattttatttcttaacagttctggatgttaggaagtccaaggttgaggggcctgcatctggtaaaggtcttcttgctgcatcatcccactacagaaggcagaaggaaaagagagtgcaagaaagcaagagggcaaaaggggctgaactctgttttataataagcccactctgtgattactaatctattaccacaataacaacattaactcattcatgaaggctattttattaggccccacatcccaactgttgcattgaggattgagtttccagcacataaactttgggggacacatttaaaccatagcagagcacttaggttaattcaactaagaggagctgggaaaatcaaaggcatgagaaagacagcaaaagctagcagagagaaatgcataggttaaggaaaaaagtcacagtgaatcctgtagtgcaggctactttatgaaaagcacctaaaaaagatctcattaactcccccagctcacctccacgcacatctaaagagccacacacagcaccaccaaaggcagcacaatgagaacagcattctcctcaacagacaagctgggagtatctagacacccgacctcaatagctccagaacagccctaaaacatttcctccctaaccaccactcaagtcaccagcttggaaagtattaagaaaacccaaatcctgacacaccactatgaaacaacttaaaacagcaaagaacaacccatttaaacagcaatgccagctgttgggaaaaaaaggaacaatgagtagaggagaaacagacctctcggggtccaccaagacccagtctctcagcttcagcacttttaaatgcagaatccatacccctctggggcctgtggagctccacaaggcatgtcgtcctcaaagataaatgagcaggcaagctggctagaaaaccactaagggtatttattctttaaagaatctttacagggtcaaagaagaatgggtcttaactggctatgtgaactccccacagattctgaggatgatgtcagtatccctttccagatgtgtttaacactttgcagtcacttgtattcctgctactgagtgccagtgctttgctaatttgaactgattccagctcacgctgaccccagctccctggatgttaccattagccaagactgtcacccatactgtaccctttcaaagagtcctaaaaacagctcttcacctactcttccaagacaagtaaaaatgtctgccaaagaaatggggaaaaaagattcagagagtgaaaacaattaatatactaacaagagagcaaaaagcaaagggggaggagaaactaggaaaatcatatatgggctctcacctatttccaaagctgggctaatgtccttttgcttgtgtctgaataaggcaccaattttaagctgataatgaaaaaaaaagaaaaagagaaagaagcaggcccaggctgggcg

SEQ ID NO: 45323 - DNA, 3639 bp, Homo sapien
cgcatctccactaaaaatacaaaaattagcctggtatggtggtgggcacctgtaatcccagtgacttgggaggctaaggcaggagaatttcttgaacccaggaggcagaggttgcagtgaccagcaaggttgcgccattgcaccccagcctgggcgataagagtgaaaactccatctcaaaaaaaaaaaaaaaaaaaaaattcctttgggaaggccttctacataaaaatcttcaacatgagactggaaaaaagggtatgggatcatcaccggacctttggcttttacagctcgagctataagaaaaaaaagaaaaagggatatcatttaaacacagtatgtagaaaagaataattattgaatctgtactggtctttaacttttacactttgatctttaattctgttattgtgattgagtccaaagaaaaacagtatgagtaaaataaaaagaacaccaaaaatgctaatattctgtttaccgaagtctgtagtgaaatatcccattaaatccaagtgcagtgacacacccataatcccaagcactttgggaggctgaggcgggtgaatctcctgaagtcaggagttcaaggccagcctggccaacatggtgaaaccccaactctactacaaatacaaaaattaggcaggcgtggtggcagaggcctgtaatcccagctacttaggaggctgaggcagggagaattgcttgaacacaggaggtgagcttgccatgagctgagatcataccactgcactccagcgtgcgtgacagaacaaaacttcaacctccaaaaaaaaaaaaaaaaaaaaaaacagctagcaggtgacatttgctatagggagactagggatatgatcttgctgcaatctttccattttagtaaatctaaacaagtgtgaatccattctgtttcgtccccactccactccagagccaaaacaagaaaaacaattatatttctagttctttaaaaacatatctaactaaatcatctaattaaaagataatatgcatggttccatactctaaaagaaaacttatgtcctgcatatcatggacatttgatgaatgcttattcagttgactggtgtagacttcaataataacctgttcaatgcattatgccagatgaatcttgcatctcaaaagtagaacaaatattgttctttcagttttgtctacccataaatgcaatatttactaataaaaagaaaatgagtttattgttctagagagtatgagaattttgacaacatgaattctcctgtcctaggacataattaatacttagaggcatactatttcatgtggaagctaccattaaatcaatgttaagtgttaattacctcacataatcttctaatctgacttgactgaagacgtacctgacaaagttgatttatcaagttgtaaatcttcacctgttgaattcataagttcatgtctgaaaggtgagaataaatacttaatattcattaggcaatattcagcaaagtaatatccactagtacatatttaatatttcatcatgaactgcgggtgtgaagagaaaggacaggctgggcacagtggctcacacctgtaatcccagcagtttgggaggccgaggcaggcagatcatgaggtcaggagttcgagaccagcctggccaacatggtaaaaccccgtctgtactaaaagtacaataattagctgggcatggtggcaggcacctgtaatcccagctactcgggaggctgaggcaggagaattgcctgaacccaggaggtggaggttgcagaaaccattatcacgccactgcattccagcctgggcaagagagcaagattctgtctccatcaatcaatcaataaaaatataagaaggaagcatttactgtgtatttatatgtctggtattatgtgaagcactttactatcttatcaaatcttcgggacagatcttcagttctcatgaccacaaaagaggatactaaagctcagacaggagaagagacgtggccagcctgtgtccccagggcctatggtcttaccactaggttacagtgtttccagatatcacatgttgtgagatttttgctttaaaatgaaccaaaaaaaaaccaaaggtgaaaaaggcataagctattaaaaagtgggagaaacactaagagaaccttaagcatgtaactaaaaatattatggaaatgttattgaatacattagcaaatttagtgctaggttttcattgaggagtaggttatattactcatgatgaagaaaaatgttcattttaagtatattaacataaataccatcaatattgtttatcatgtttaaatgttcacttaaagcaattcagttaaaattctgcatatcatacaattttatagtttgctagtaggttacaagtaaatagtcacccaaataaaaacatcatgttttccactggttgttgctcttttttaggtgagtatttgatatataccaacagagagaggataataacaaatcgctaatttctttcatcactatataaaggtggcttcaggatagaatagtatcagtgtaatgatgaatttgaaatctaacatcaattcagtgatgcatcaagataaaagtagagacaacaggggcaccttggtgagtactgaacattttatttatttatttattttgagatggagttttgctctttttgcccaggctacagtgcaatggtgccaacctcgcctcactgcaacctctgcctcctgggttcaagcgattctcctgccttggcctcccgaatagctgggattacagacatgcgccaccacacccgtctaattttgtatttttagtagagacggggtttctccatgttggtcaggctggtctcgaactcccgacctagatatctgcctgccttggcctcccaaagtgctgggattacaggtgtgagccaccacgcccagatgaattccaaatttaacaaagcagactaagagaaacaattcatttaaaaaaataatatttggccaggcatggtggctcacacctataatcccagcactttgggaggctgaggtgagtggatcaggaggtcagcagttcaagaccagcctagccaagatcatgaaaccccgtctctactaaaaatacaaaaatcagccaggcgtggtggctggtgcctgtaatcctagctgctcgggaggctgaggcagagaactgcttgaacccgggaggcggaggttgcagtgagccgagatcgtgccactgcactccagcctgggcgacagagtgaggctccgtctcaaaaaaaataaataaataattcaatgaaattcctaagatccagggctttgcaataaatatgtaaataaatttccaatctccatactgaaagtttaaaagaaatgctaactaataactaaagaaatacaacttttcctcagctttgcagcaatctagaaacaaagtgtgtagacactacaaagcaccttacaaggagaaacatgtaaggatggcatgactcgccggcagccctgggattgtccacggtacccccatgatgaacagtaactccactgtgtaaacgcccatgaacctaagattacaagacttttccagtttagacataccatattttctttcagacaattcttcagtttgttta

SEQ ID NO: 45324 - DNA, 1365 bp, Homo sapien
cggcccttgcagcaagtgaaaagcctattattgattccctccctagccatgtagacagtgaaccaagacactcatatcaggtaaatgccttgttctctgttaccaaggtaaccagtaggcattcccagatacagcgaaggtcctcacaccaagatatgcacctggccacctgaggaaagagaaaggactatctgaggggacggggctgagctgggtgtggagtggtccttgtgggtcttggagagtgggagggggaacagcatgagccaggcctcgaggcagaaggacaaccaggagacagcctggaaaaagtgctggacccacaagggctcaaggctggccagaggggaggtgggataggctgtaaagtcctgaggtctgaagattggccctggcaggaagaaaccaggtaaggtggggtgttacctacaccctcggggccagatgcaggccagagccagccaattaccaggcccttagggaggtgtgagccccttgaaatgatgcaaggttttttgtttttgttttggagacggagtttcgctcttgtcacacaggctggcacctttgcccagagcaggcaccaagacttctggctctgggtgtgacctcagtctgggtaaaagccccagcccccaccagcaccacctaccccctagactacttcaggtgctgagcccaagccaggggcaggaagctaaactgatgcctagggtaatcccaacaaagtccctggttccccgcagctatggggctgacggggaattacagcccaaaccccagatgctggctctcaaactaacactgagccctcagtgcccacagggagatacaatcagcgcactttccagatggggaaatgggatcagagaagtgcaacagccttgcccaatgccccagaccagggctccaggcccagagtgttcttttgtcactgtgttcagagggcagcagctgctgtgatgtacccacctgagcctggcagctctctccaactttggaagcccaggggcatggcccctgtccacagatgcacctggcatgaggcgtgcccagagggacagaggcagatgagtttcgtctcctccactggattgtgagggcctagaaggagacaagggtctgcttgagaaggcagtgaacagcgagcagcctgaggcagtgcccctctggatggatgcgcagtgcctggatggaacctggctcagacagagctcagttctgcaggtccctgaggcatggagagttcacagctaccaagtgtaggagtctggattcaaagccaacggcgtgactccaaagtccctgccctagcccctggaccacccttgcaggcccatcagatgcccaggccagcagcacagc

SEQ ID NO: 45325 - DNA, 1012 bp, Homo sapien
cgttagaatgctaaaaaccataaacatataacaacttaaagtacatataaattcaatatatatccaatcattgtaactatgacacagtagaatattaaaatactattttcaaaatgtatacaagcttaatgttctatgtattcaaactatttattcaaaatacaaatcatcaacatacattgccactaatattcagtcccttcacaggacatgattcactgggagttaataaattagcagccagcaggcagtgacacaccgcaaaaatgaaaaccaagaggtgaaatagttctgaaataaaggttttaaagctaacagaaatcactgaattactaagtcattagcactaattttgagccaactaactaattaatatgagatgatacaatgtcctatactttggtaaatacagactatgtttaaacaatgtctgtaacgtgacttgtaaaatgctcctggctttacaaagatgtgattaagatgtagtaacacatgctaaaccatttccccctgcagagcatgtggtaactttcatcagtcacactgagagtacagaagataaaggaaaaggtcatggatttcgctgagaacttaccagagttgaactccctcattttccgttccccagcattggcaggttctgggactggtggctgtggtggctcgttggtctttgtctcttagaaggtggggaataatcatcatcttgaaaaagaaaaaatggtcattactgaaggaaccatcttaggttacagccacctctgggtcaattcccaacattcaaaagctgagcagggctttaaagctatcttattaataattatttctgtattgcgaacttcagcatacttttttctagttacatttgaaatgttattcttttgggatgtgctcaagtgagtactgctttttcctctgccttgcttcattactttttagtttccttcatttgaatcatcattgtaagtctccccttctcctcaaataactttcaaattgctgccaagaacta

SEQ ID NO: 45326 - DNA, 2676 bp, Homo sapien
cgggcgtgatggaaggcacctgtagtcccagctactcgggaggctgaggcaggagaatggcgtgaacccaggagacagagcttgcagtgagccgagatcgcactgctgcactccagcctgggcgacagagcaagactctgtctctaaataaataaataaataaatgttgtctgccacagaaaaaatcgaatattttggtagaaaccccgtctctaccaaaaatacaaaaattagatgggcaggacggcatgtgcctgtagtcccaggtaatcaggaggctgaggagggaggatcgtttgcacccaggaggtagaggttgcagtgagctgacattgcacctttgcactccagcctgggcgatagagccagaccctgtctcaaaaaaaatttttttaaatgaaaactatagccattgtgagttatcagattctagtcttgtttcttgtttctgggctatttttacctctttgtaaactggatcctgccatctgatgaattttgtcccacaatgatacttggggaacaagaagccaagtattgtctctcctactaatgtatctattgtcagttaatttgaaggtctccaaccctggaacaaagttagaagaggaaggttctactccccaaaatgcataaccaaattgtgctacattcatgtaatggaatactatttagccatagaaaggaacaagatatcaacacacacaaagacatgagtgaatcttgcatgcacattgctaagtggaagaagacagtctgaggaggatacacatagtgtgacctcatttaatgagacactggggaaggcaaactacacagatgggaagccattggctccatggggtgggggtttgaggcattccatatgatactttaatagtgggatatctgccacaatgcatttgtcgaaatatgcagaattttacagccaaatggttaaagcaaactctattcaaattaaatcaaattactcaggatgtggagtatcccaggacagaatacatcatgtgaaaaagaatttatgctacaaattacgatggtttggatgtggtttgtccccacaaaaactcatgttgaaatttgactcccactgtgtcagtgtggggcggtggggcctagtggacggtgtttgggtcgtggggacggatccctcatgaaaggattaatgtcctccatgggggtgagtgagttctgttctcacaggaatagataattcctgcaggagcaggtaattaaaaagagtctggcttccttggcttccctcttgctttcacttctgctatgtgatctctggtgcaccccttgctccccttccactttccaccatgaggtgaaaaagactgaggccccgccagatgcaactgcccaatctcagacattccagccaccagtattgtgaaccaaatgaaacttttttacttataaattacgcagcctcaggtattctgttacagaagcacaaaatggactaagacacaaatctaggtaaaaactttgaaaatgaatagaatctgtaggctgaaggcacatgaactatacttcattattggattccattttataaagttctttccaacagaagcaattgtgaacaattgtaaaaccacagtgtctgtatctggagtaaaacaatgacttacataagtcgcagatggtgggaaccagctttctcactgttgaagtgggaggttacaaattagcaagacgagaaggctagaatgattcctgtgatagtagatcagaggtggagacatcaacgtaaacttatgcttagtttaatatagatacacacagttctacatagaaaactttataattaggtgtgtgtaggtaggttagacacgcacatatacttcctagcattgctaatgagggacaagatacaatgtgcattcagcagccacatgtaagttttcccaccattctgaaaggaatcaggctctttgaagaaatgtctgatactagaactgggacagtaaatataggagccaggataatctggaagtatcagaaagtaagtactaaaaaaattaaaatatatcaaacaaaaataaaagccaataaaaacagctaccgatggccaacacaggaaggaattgtgcaacataatgctatagtgtcaaataataactaaagcttaaagtaattatctaggtgtctgtatttgtatacctaggtgaataagcaaatggagttgcatagaaatctcctttgcaaaagaattccaaataactgatgtagacactcagccatcaagaaggtggagccaactcctcactccgtaagtgtgggctctgcatagtgacttgctccaaaagaacacatgcagtacggacaaggaggaaaaataacttcacagtggagaaatctgacaaacagtagctctgccaaatgatccaagtgaatatcaaagctgacagttcaccttgagaacatgaagtgacaatggggggcattctacaaaattcctgaccaatcctcctcagtgctatgaaggtcatcatgagatggaaagcctgacacactgtcacagccaggaagagcctatgtgatgactacatgccgtgcgggatcctggatgggatcctgggtcagagtaagatagaactaagggaatccaaatgaaatatgaacttcagttaataacagtctatcagtattggttcattaactgcg

SEQ ID NO: 45327 - DNA, 4829 bp, Homo sapien
cgtaaaataaaactttatttaaaacacagtttttttaacacttccttgtttaattatttataccatgaattactagtaattgacactgttaactagtcctgttttttaaaataagagcaattatgacacaaaaaattaaacagtgcagactgatatataaatcaaaacaaatgtcctttacatgttttctgttacagtagtaacaatatgtgtaaacttaattatcatatttttttcttgtgctgtggttgtgtcctgggttcattctctaaaatgctgttcaccttagaccaggaaaaatattaaccatacagactctgtttcaagtcatagctgaatattttcaaaagagtgactttgtaaaaacatgttccaatggcaaattgattcattgtgatgggatcaattattccaaagacttcttgtctttattttgttcccatgcctaccttttagccataatacaacagaatcaaatattggccactgggaaaaaatattcaaagaaagaaagaatgtgaacagaacttatgaccatgatgattcaatgttttaccacaatgctttctaaaacaaaagagtctaaaaggatattcaaagtcaatttcctcagcgaggatttgcagaaaatgaggaaactagaaaaacaaaaatggcgggacattctacgggtgattttaaatgttgctatgttttatgggaaaaaatactttaccttttaaagaatcacaaagaattattggaaacccaaactctggaatgtttgcaaatttagttgagcttctgtgtaattatgtctatataggtagccatgaagttgatgatttcttaaaaatctgtgccttatttgtgtaataaaagacacaatgaataattaatactcataggaacacttacgaagggaaaataaatcttggggactcaaaatcactaagctaaagggaaaagtcaagctgggaactgcttagggcaaacccgcctcccattctatccaaaacacccgtctgatcacctagataaatgcatacctgattgcctcacatggagagggtaatcagcaatgcaaaagaatgaaaccatttgtctcttacctacctgtgacctggaagccccctgtctggccttctcacctttctggactgaaccaatgtacatcttacacgtattgattgatctctcgtgtctccctaaagtgtataaaaccaagctgtgccccgaccaccttgggcccatgttgtcaggatctcctgaggaggcatcacaggcgcacatcctcaagattggcaaaataaactttctaaaaaatctgagagctgtctcagattttcagggttcacacatgtaatgtaggatgtcaatgtttataaaagggatgttattctatctactattagaaatatgctgtcaattaaccttaaactttctcaacacaataaaaaatgttgatgaggtacaaataatatatctaggcttaaatagtgttgcaagttttaatatgcctacttttcaatttttcaatactatctttactaatttaacactgtaagaaaaatgagtaattaaaacatgaataaaagtgtttacaggggatgcacatgtttcctccagcctctgcctatacccaactttcatcccaactgtcctgatggtggctctaagcatttctcctttctctataccaagatatctccccagaaacaaacccaaatcttactatatgttatggcacgctatgatgatgagcagcgatgagcagccgaagcctcaaggaagggatgcttttgtaaaacaagacttgtggaatataacatgtgaaagtaaagcccatggcagaactccctcctcagcacacggggagcagacaggaagctgttgcctcaccttcctcaatggcctacagccacatctccccaggtcagtcttaaggacaatgaaactctggtcttcactgtggacacaccacactaccaggcgctccaaagccatggtgacccaccctcgggtgggtcctgaggagaacaaagctctggttctaattctaaccctaaccttgtcccaagactttgacactgaacctaaatcctgatccctatcctggtccctaattctgacccttactttgaccctgactttgatctcgaccctgaccatgaccccacctctaaccatacttctggccctgactctgacccagatcctaatcctatccctaaccctattattatctttacaatctatgtctaatcttaccctctagtgctaaatagctgtacccaaaagcactttaaaattatttaacttcttttccttgaattctctaaggacatcctaaaggagatgtcaatatgtattttgcattccctctgagtggtatggcttcagataagaagttctaatactttgcaagacataaaaagtttggagggtgacagcactgggttgttagggatgcatgttggcattcgtggtagtcataggtgctgttctccagatattttcagttcatattttatgaatgcattctgactgttccatcccgcctacttacattttcacatggccacatgactttttttttgccaatggaggtgagaagaaataacatgtgactttttcaggagaaatctccaagaaacagagtgctattccgcatacttttttctcttttctatagcaatggggatcttattgattgtccctccttccgtctggattcctgtgttaggatgacacagcacagagctacctctcacctgacccatgatgaaatgtaaataaatgaggaagaagatttttgagccactgaaatttggaggttgtttgtcaccacagtttaacctagcccccatttactgatgcacggctgaagaatgagtccgaactggatctggacaagacatgtgaagagcgctccaggctgagtaaaattcaagtgttgtctcaaagataacactgagcacgatatgttattggggtgggtgtgggataaataaggtatatcaggtgagaataacaagaaactcaactttaaaagacggtgccgatttggaagacaccaaattggaagacagcaggagctgccccataataccagtaaagtgagaagcagagataaactagtcctagacagctgactcatgttgggggcagcccactcacagtggccctgacccaactctgactagaggccacttgatctcaacaccagggtgctcaatggcccgtcctggtactctgctctacactggttgtaggaaggaatctgcaggttgaaataaggagatcatttccctgaggttccgaagctcatatttactcaccatttgttgtttactgctaatgttgagcactgtcagtaaaatacataaaaccctttgccaatccaggaagtgaaaatgacactttactgttttaatttgcatttctctgcttacaagtggattacacacattttcgtgtgctgttggctacttattcattcagaaaacatactaagtgctggctctttttcatgtcctttatcaagtttggatcatgtcatttgctattttctttctgatgtaaactctcaaagtctgaagtgtattgtcttttcctgacacatatgttgtaaataattttctggcttacattttgacttttaatttcattcacgatgtttttaatgaataattttaatttttatgaatgcaagttaaaataattctttcattgtggtctctgacatgtcatgccaataagggtcttctcctccaagagcacagaaatatttgccaatactgtccttaaaatcggtcacagtttcattttttatatatgcattttacttcaattggggcttcattttactgaatgccctatttgaagcaagtttctcagttaattcttttctcaaagggctaagtatggtagattgcaaacataagtggccacataatgctctcacctcctttgcctcctctcccaggaggagatagcgtccatctttccactccttaatctgggcttggccgtgtgacttgcactggccaatgggatattaacaagtctgatgtgcacagaggctgtagaatgtgcacgggggcttggtctctcttgctgccctggagaccagctgccccacgaaggaaccagagccaacctgctgcttcctggaggaagacagtccctctgtccctctgtctctgccaaccagttaacctgctgcttcctggagggagacagtccctcagtccctctgtctctgccaaccagttaacctgctgcttcctggaggaagacagtcactctgtctctgccaacccagttgaccgcagacatgcaggtctgctcaggtaagaccagcacagtccctgccctgtgagccaaaccaaatggtccagccacagaatcgtgagcaaataagtgatgcttaagtcactaagatttgggcaaaagctgagcatttatcccaatcccaatactgtttgtccttctgtttatctgtctgtccttccctgctcatttaaaatgcccccactgcatctagtacatttttataggatcagggatctgctcttggattaatgttgtgttcccacctcgaggcagctttgtaagcttctgagcacttcccaattccgggtgacttcaggcactgggaggcctgtgcatcagctgctgctgtctgtagctgacttccttcacccctctgctgtcctcagctccttcacccctgggcctcaggaaatcaatgtcatgctgacatcactctagatctaaaagttgggttcttggaccaggcgtggtggctcacacctgtaatcccagcactttgggaggccgaggcg

SEQ ID NO: 45328 - DNA, 2235 bp, Homo sapien
cgtcctctcttgagctacagcagattcactctgttctgtttcattgttgtttagtttgcgttgtgtttctccaactttgtgcctcatcaggaaaagctttggatcacaattcccagtgctgaagaaaaggccaaactctggaaaaaattttgaatattttgagccaaatgtgaggactacaacctgtgagaacggaaaataaatcctgggaccccagactcactaagccaaagggaaaagccaagctgggaactggcttatgcaaacctgcttcccatctggttcctaaataagatagctattacacaaagataaaaaagctacatccctgcctctacctccatcgcatgtaaaatgtgtattcagtgaacgctgaccaaagacagaagaatgcaacaatttgcctctgatttacccacacccattttttccacttcttcccctttccccaatacccacacttttcccctttacttactgaggtccccagaaaatctttgggaaaagcacggaccacagtttttcctgtggttctctgttcttttctcaggtgtgtccttaaccttgcaaatagatttcttgaaatgattgagactcaccttggttgtgttctttgattagtgcctgtgacgcagcttcaggaggtcctgagaacgtgtgcacagtttagtcggcagaaacttagggaaatgtaagaccaccatcagcacataggagttctgcattggtttggtctgcattggtttggtctggaaggaggaaaattcaaagtaatggggcttacaggtcatagatagattcaaagattttctgattgtcaattggttgaaagaattattatctacagacctgctatcaatagaaaggagagtctgggttaagataagagactgtggagaccgtgcatagttgcttcctgatcagctctttatttgattgagagtgaggcagggaagattagagggaagcttacagtggaattcagggctaaggctgctattcttttgctccttgtaacttcctacagtgttgtcagcatccacatacttctctgtggggttggtctcagagccaggttaccttgtcttaggtccagtggcaccctgactggcttggtgtccttgaacaagttacctaacctctccatacctcagtccctcagctgtaaaattaaaaaaaaaaaaaaagaagaagaagagtacctactgtatagcattgatttgaagattgaatgagctggtattatacaacgtttagaagcagtgcctgacacgcaaaaggctctcaacaaatactatcctttactaatatcctgtgtgtctgtatcagagctggtggggtggagggacagaaacaagtgggagaaggtaaagagatgggcaaatgatctctaaactctctctggcactaacacaattctttattatgtgttttgtctggctctttatattgatagctgttccagaggcaatcaatagctattagtcggttttattcttatttttctgtctgatcttacaagggagcaaactgtggcaaagtatgaacttacttctcaggaaattaaccattatattggcaatcactgtgattatttgaacttcagcgtctggacaaatttagtcacatgaaatacagaagagagatttctcatggttaaaacgaagctctctttatttgcttctgctaattaaaaaatcagagctaaagatacttaaacactacagttaaaatgccatggttgtctattggcttaacgaattctcttatgaaatcaactctaaaatgttatccatcataaatcatgaaacgcaatttttcttattctctttagagctttacaattcatcttaaagaccagtgtttacactctcttctgtaggttgtacaataacttttggtgagaaaaaataaaagtctggctttctgactcataggtgtgttccctttaacagaaaaagaaaatatgtcctctttaaaactgatgatcattggtcacctcaattttattgaagttcacttctgacctctttagatgtagttctctacataaaactgcccaacagaattctctgtctgaatgtctcctccacaaacaaaattttaagaactaaaattatcatctttccttccaaatatgctctccctatgtccccagggctctccatgtgtagagctgagaccatttgccactcagtttcctcacccaattaattacaagtcccaacaattttc

SEQ ID NO: 45329 - DNA, 5063 bp, Homo sapien
cgctcttaggatcaagtctaaactcccgaccctggaacatcaggtcttcgtgctctgttcactgcttctctacctcacctgcaaccaacaccactcccacatccatatgctgctcaccgtgtatcaacatgaacaggaggtgggtgtttcagtccccaggaagacactgggccttttcaatcatctactgctttgtaataaccaccccgcaaactgaccacatgatttcattttgcaagggttccttccttgggctgtgttcagcaaaagggtttactgagctggcaggtccaagatggcctcactcacaggactggctgttgatgggagccttgatgctcttgggctcaccccttatcctccagtaggttagagcttcttacagtggtttcaggcagcatctgaagacagtaaaagcagaagctccaaggcttcttacattctagcctggaaaattacatcacattgcttccttcatatttttttggcaaatcaggttgcaaggcttgcccagattagggtaaagaggcaaagaggctccttttcttttcttttcttttcttttttcttttttttttttttttgagtcagaatctcgctctgttgcccaggctggagtgcagtggtgcgatctaggctcactgcaagctctgcctcctgggttcacgccattctcctgcctcaggctcccaagtagctgagactacaggcacctaccaccacacccggctaattttttttttttttttgtattttttagtagagactgtgtctcactgtgttagccaggatggtctccatctcctgacctcgtgatccttgcaaagggacatgcagaccacattagtgagaatatgtgcctgtattttgcaatctgtaacatgggcataaactaaatgttttccaaagggaatagggcaaaacaaaaaggaccttgaccactccttggccctgaataaatccaggaagcctaagagtatgactatcctgaggtagaaagagggtcacatgctggataagaggtacctgggctctccacttacaagaagagagcatggttacatttataatcaccattcccaacatgctgtgagtgcaggcagctaccaggaggagaacaaaggaaataaccaggacactcatctctaaacctgttaatttaatcacacggaacacttctatttaaaattcccgagagttaagatgtaagaatgcttatcaaggtaaatgctgttcacactgcttggagtgtcaggcctagatctctatccatcagaaacaacaatatcaataacaacaacagcaacatgatgatggggcaatttcttaaaagcaccatgtattttatcgatacatgtccgttgcagaaaatccaggtgaatccaaagaagaaataaatgtcttccacaatcccatagcccagagctaactaaccactataaagaacccagcgtggttttaactcatggatcaaaagatgctcatcaaaggctctgagctttcctgagtgctaacaggaaacatccagcatcactggtctctccaaggctgcaggtgtctttgcccatagtgcctgttttgtgtcagggaaagaatcaacctgggagccaagcccaggaatcaggatgaccaagacatactgcacaaggagggaacaaacccatccaaggacactcaaggacaaatcaagcaaatgaatttaagggagacgtgctcatggtctgctttgctgctcagcatggctgggaggcacagtggaagatcatgcatcctgcccctgggactcctctgccagagcctgagagctttctcctgcccacaggctaggggtagggcagttggaattgatccatgccttctagctagactgtgggtcccctcagtcttgggcatggtgacagcccagcatcagacagaggtcagtatcaaactagaaaatgtaataaatactgtcagatttgtagacccaagaaaatataaactgccaatcatggaggaaaaaaatctctcaatgatcttatctttatatgattcccttgctgcctggagattgacatttccttggggataatctggtcataggattggtgaaggtggaagggaggcaacctccaaaggtggggccctctgctcacctgggacagggagggcctgaggtaggtgtctgtgtgggctggggaggaggatgggagcagtgcttctagatgtttccactttctcctcattagataataacgaatgggtgatttccctagtcactgcagtgtgaggaaatctacaaaattaatttcacaatacactttacaggataggtggagaaacacatgaagcacaactgcagtgggttataaaaaacggccttttgagttgagcaataaattcgttcaagcagccattctgaaggacaaactggctctgtatttaagaggggcattccagcacttctctagccactgggttgacaatgactcaccaaagcctctggtagccaccacaggacacccagagcatatgttttaaagctgaacaccaaactgcggacttcgggagtaagtgaactgactggtttttattttgttttactgcttttaacattacagtaactgttacaggttccagcaggctaactgggtggaaatgagtttggtttcacttagtctctctaaagagaaagcaagtcggtagactaatacctaataaaagcaaagctgccaacaattgaaattgcctaggctgctctgtgtgtcccacatgcatgggtgtgggtgccagtgtgtgtgcgtgtgtgcatgcatgtgcatgtgtgttgggatagagtggtaagaaaatgggaaataataagaatgttcagtccatagcccttcattataaaaaggtgagctgtaataaatactagtgccacatttagccaaaactttactccagccaaaggtgatattttcatgataacatcctgtgattgctttgttcttcgtcttgtatgttcttcctagatgggctcagaacatacaagaattaagtacacatcttattttccagtgataatgctaccggcaaattctgttgtttgtataaacatcagccaagtttatataactaaactagtgttttgttttgtcaattcagcaagaaattagaccaaatggtggcttaatgctgcattgatttgactatcaatttgttttcacttttctgcaaaataattaatacattattaaattgagttatgctgatgccacagttgttcttatctcaagtgtcttaaaattcatttaatttgtttttcctttggtttcattattcagattttaacttcagttctcaagattttatctgatggaagagatggagtccattactaaggactccattgtgctccatcatgccagagttgtaaaatagatcttttaaaggaaatttactgtgattttttttctatttaagagcttcctctccagttgagcatgtaagaaaattataccaggagaatacagtaaactctatgaggcaagctataaacatgtagcattgtgattagggctggttctccttctagagatatggtaggattgcaatttcataccatccttgaagttagagagagccatgtgactcatttagccaatgaactgtgagcagaatgacatgtcacttccagctgaagctttaacaatctgagagacattcatacattttccatgtgctgtagccttatacccaaagcctgggtcccaagtgaccatgacaggcagagctccctggtgagccacagagatttagagaatggctgttaacacagcataatccagcccatcctgactaatctgatattaacatgtataataaagaattctatcaatgctgagggaagatgactagttaaggtcctaggttgcaagtctcaaaacctcttctaaggattgtagacaggaaattaaatgacttctagtccctagagttcccaatctcctaccatcccatcctaatatgacagaagtaattcctgagttgcttctgaaaccagagcttccctcagaacccttagcctgccagatggcttcttggagagccctcactcacttttctccttctgctattgctgctcattcattccagcttttaaaaattcatctttatccaggaacctcgcttctagaaaagtcatacaggtgcttccaggaggctacatgggcacccatatttttctagccactttcattagaccaatgcagcagagaagaaaagcctcaataattattatgacatggcatgttaggataccaagtaaattgcatttgtaaaatgtgattttctgttggtgttcacttctgctctactgacatttggtaagtattattgactgactgactaactaatgtggtcattagtcttcataaagaaaggctctctacaaaaacggaaggatgccctttttctggcatttaatacgtaagaaattgcctccaatagaaaccagagttgcctgattactatcagcacaggagaaatgtattaatgtgcctttctagtaacaggtttttagaaagtcaaatataaacaaatctgtctatttgtgtgtgtgcatgtggtagtggggagggaagaaaaaaggagggggagagaaagagaaataagaaccaagtttattatactgtattcagggggaaaaaattttcccaaggttctaacagaagagcaaagtgccactgtcaatagcctcagtagtgttagagttgcttttatttatttatttatttatttatttatttttccttttttttctttctctttttttcttcttttttttttcttttctttctttttttttttttttggacagagtctcacactgtcacctcggctggagtgcattggtgcaatctcgactcactgcaacttctgcctcccaggttcaagtgattctcctgcctcagccgcccaagtagctgggattacaggtgtctgccaccgtgcctagctaatttttttgtatttttagtagagatgaggtttcactatgttggccaggctggtctcaaactcctgacctcatgatccaccca

SEQ ID NO: 45330 - DNA, 3550 bp, Homo sapien
cgcccctggccaggattgcttttacagccagtcttcaggtgcccactgtaggaacaatgtcatttaaccctcgggattattctgtgccaaatatggataatgactaatatccaacacagatattctcagctcagaagagcaattagcaaattcataaattaagtgcttgcttcctctttagtcaaatacaaacgtttgttaaaagatattattttgctttacactttttctctcagaaataaacagatgcttgaattcccacagtgctgcttgagcctcacaccatgtcatcctgccaggcacccagatccagttctagagtttcacatgatcatgagtgttggttaataagtcaatgcgaactgggaggggagatttttcaggagtgccacagggctctccctttaatcacatacactccctgctttcattggaaagtgtataatgatgtcagagtgccccagaatggagctagttggaagactgccgtcatagggatgccttagtgaattaataaggttttaatttctggctctcaactttgtagatgtaaaagttgatttatcaatatgtgagaaaggatgaatctttctgaaggttatgtcatcacactcactaagcacacagagaataatgtctagaatctgagtgccatgttatcaaattgtactgagactcttgcagtcacacaggctgacatgtaagcatcgccatgcctagtacagactctccctgcagatgaaattatatgggatgctaaattataatgagaacaatgtttggtgagccaaaactacaacaagggaagctaattggatgaatttataaaaatatgcctcagccaaaatagcttaattcactctcccttatcataaggataatcttgcctaaagggacagtaatattaaagacactaggaataacctctgtactttggacagtagacctgcatagcccattaggcctcaatgaagtcttatgcaagaccagaagccaatttgccatttaaggtgattctccatgtttctgctctaactgtgcttcacaatactcaaaacactaaatcaggatgtttcctggagttcagggagctgtccgtgttactgagcagttctcagcaacacaaagatcctactgactcctcatcagacttctttctcactggaattttacacctgggctgttaacaccaggccaggtcaaattcaaaggagagaaaaaagctcattatgaagggtaaaatccaaaacactgtgcataaagatatgtgtgcacaatttttatacataaagatttcataaaaccaaagcatcaggaaatgaaaagagatacagaaagaaaaatgatggtaaatgagacattaatttacccttctaatctctatcacagcaaaaagataattaaaaaatctatatgaggaccacaaaatacacaaaaattatgtagcaaagcctatagcctgaaaaagtaaacattgaaatttgtatgtccataaaatgtttacaaaattcagtacatattacacaccccaccctaaaaacatctaagcaaagtagagaatgtagaaatgctacagattatattctctgattatgacacaacaaaactagaaattacagcatggaaatttaaaagctttctcttaaataattctgtgtcaaaaagaaatccaggccgggtacagtggctcatgcctgtaattccagtactttgggaggccaaggtgggcaggtcacttgaggtcagcagttcaagaccagcctcgtcaacatggcgacaccctgtctctactaaaaatacaaaaattagctgggcctggtggctcatgcctgtaatcccagctacttaggaggctgaggcaggagaattccttgaacccagaaggtggaggttgcagtgagctgagattgcaccactgcactccagcctaggtgacacagcaagactctgtcaaaaaaaaaaaaagaaatccaaataaaatttccagaatatgtggaaaatagtgacaataaaaatattacacatgtgtaatcccagcattttgagatgccaaggtggcaggatcacttgagaccaggagttcgcaaccagcctggacaacatagggagactccatctccacacatgccaaaaaaatttttaaatagccaggtatagtggtacttcttgtaatcccatctacttgggaggctaaggtgggagaatcacccaacctcaggagttcagggcttcagcaagccatgatcatatcactgcactccagcctcagcaacagagcaagatcctatctcaaaaaaaaaaaaaaatcacatgtgggaaatagctatagcacaataaaaataaatgtattaagtatgaacaacaaaaaagctagtaaaggttgaacaacaactatccttaggaaagtggaaataatgtattaataaatatgaaagcaggctaggcatggtgactcacatctgtaatcccagcactttgggaggctgaggcaggcagatcacctgaggtcaggagttccagaccagcctggccaacatggtgaaatcttgtctctcctacaaatacaaaaactagccaggcttggttgtgcactcctgtaattcgagctacttgggaggctgaggcaggagaatctcttgaacctgagaggcagaggttgcagtgagccaagatcatgccactgcactccagctggggcaacagagtgacactccatctcaaaataaataaataagaaagcagaaactaataaattagaaaacagaaacatagaactaatttataaatcaaagcactatgccttgaaaagagggagaaaaattgtgaattaaggaagggaagagatggttggagaggaggtgggagaaggcagagataattgaaggagcaaaagcatctggagaagcaaagccactgaaagatgaacagggctctgaaagagatgcttgattgctatcttttcaaatgactgcagttcccagtgacatcatttttctcctccctggaagtctgaggggcagttcacttatctcctcccctcccctactcctcaccccacactcaaaacctgtctatgctcctttcattctcatatgacagatttcagatggcagtcttatttccctgatttctttttgagatagcttgcatttccctcctctatataaagccaccgtttatcaaatgcctacatggaccaagcagtccacaaaggcttcacagacagttttactaaactcatgccaaaactttcaggttttatacctaccttatagataaagaaattgaagcttatagagtttaagtaatgttcccaaagcctcatggctagtaattcaaacctaatttctgcctactccaaagtctatttttccttatgatactatactgcctctccatggataaagacagagatcacatattaataaaatttgcacaaagtcggcaaattgttgaaagggaaggctaagatgattaataaaatcaagagccagatgatctcaacaacctgaaataactggctgacaaccaatttgaataactccctgcg

SEQ ID NO: 45331 - DNA, 1703 bp, Homo sapien
cgggcctgctggtggatgcctgtagtcccagctactcgggaggctaaggcaggagaatcgcttgaacccaggaggtggaggttgcagggagccgagatcgcaccactgcactccagcctgggcgacagagcgagattccgtctcaaaaagtaaaataaaataaaataaaaaataaaagtttgatatattcagaatcagggaggtctgctgggtgcagttcatttgaaaaattcctcagcattttagtgatctgtatggtccctctatctgtcagggtcctagcaggaaattgttgcactctcaaaggattaagcagaaagagtttaatgaaggatctctttccagggttaagggaactgctagggtttggatatttgaccactccaaactcatgttgaaatgtgatccccattgttggaggtggggcctaatgggaggtgttttggtcctgagtgtggacctctcacgaatgtcttggtgccatccaagtgagttcttgctcgctcttttttttctttttgcgatgtagtttcactcttgctgcccaggttggaatgtagtggtgcgatcttggctcactgcaacatccacctcacgggttcaacccattctcctgtgtcagcctccagagtagctaggattacaggtgcccaccactatgcccagctaatttttggtatttttagtagagacggggtttcaccatgttggccaggctggtctcaaactcctgacctcaggtgatccacctgcctcggcctcccaaagtgctgggattacaggcgtgagccaccgtgcctacctagttctagctctcttaattcccacaagagctggttgttaacaagagcctggcacaaacccctctctctcgccacgtgatctctgcacatgccagcttcccttccccttctgtcatgagtggaaacagcctaacgccctcaccagaagcaaatggtggcaccatgcttcttgcacaccttcagaactgtgagccaaataaacctctcttctttaaaattattcagcctctggtattcctttataacaacacacacacacacacacacacatacacacacacgcaaaagcagactaaaacaggaactaattagaaatggtgatgcaccgagggattggcaccgaggctccccaacaggaactgaggtcatggatagaaggacacattcatgttatttttttctaatggttaagtaattatttgctcttactctcaaaatttctgccaaggcctcccatggaccaaactcaactagaatctaggaagcagagaacctgagtgttgcattcagcagaagtcagcttcctagggaatcttgcaggaagggtgaaggtagagaatctggtggggaagcaagcaaatgcccatcacatgcactttcctccaacagagcgactcagatgctataaaacttgctaacacagtctcagggtctgatcacagtaacatacaatccaggttttaatcatcagaaatcacagtcctattgtcttctgcacagacccaaacacacttggaggtcatgttcaatatgaatacctcacagagaaggaaatttacacgcgagaagtacatctgcagaaagccagctggcatgtcaaccattcaaaaactcagggtgttctggataaagaagactcaggaagacaagtatgaagcataatctgtgacattccatgcg

SEQ ID NO: 45332 - DNA, 8617 bp, Homo sapien
gaatttatcttcatataaacaacactgagctaaatctcaatatttcagatctctagaactatccatcagtgaaatggattgcaaatacaaagagtaataccatgtcacttaagaatacaatcatggacgaggctgccacctgctgttgggggccactgcagaagaaattccagaacactggactggagagcacctcactttccttacagctctaagtttctgactcagtgacctgattcactaccatatacacaaagacccacttacacaaatgactgttcttcacactaggcccatggagacagggataaaattctgaatttgctcagataccttctccgctactgacatctaggcattacacaattcatctcttcatatttaacctttgaagtttgctacttctcagagagactaatgagtagtgagcaaatatcctgaagttgagaatgcttctacctcctctcaaaacaacggaatattcatcaaaacacaacagttctgcacttaactttaggccttttctaacaccttgtttcttggcagtaactgtggccagaatagctctttccacagataaaggaccttttgaaaggatagggtctctagatagaaaagcaaatgcctcattccagaaggtcttcaagaagaaaatgttgtggtgataacaaacataactgattataatctattctgtgaaaaaagcttatgaaacagtagatgtgtgtatctagtacataagagctgaatgtcaatatatatatagatatatacacacactcaaataaataatagttatctctaactagagaaattctagttgccttatattttcttctttttccttactatattttctacaataaacatgtgtttttaacaagaaaagtcttttctggtgtgctttttaattttctttgtttaagtgagagtgaggctacataactacatggctaggtagacttttagaaaacttgactgctctagaaaattgacatatcctgatttcttccatagcttggatcttgacctagagggaaatataaaagtgttgacttgaacctgaggggtgccattttcactgctgaagtagtttcatggatcatgaattggagaaatgacttcagcaacatgggtgttaaaaacagaaagcacaagtgacccacaacagatgatggagaacaaagagcaagctgggaaagcagtggcctttaatacagaaaagaagaagtatagccacaataaatattaggcagacagcagttcagcagtttatactattaagctgttgtttaggggaatagtaaactgacatgacccttgaggtaggtatatataggtaaattctatgtgtcccttgaaataggtgtatgacacaacttctggcatctacatggatttggtcactctaaagtagccatgaggcttaagatagttcagctgtttggggataagttaaatcatttgccattgtctttctgcaatttgcatatcctacagttatcattgccattactgaatggcacagagaaaaattctggtctaaagtggttctcaaacctggttgctggagggccaccctcagtgatgatgatttaatctgtagaagagtagaacattgatagtttttatatatctccaggtaattttaatatataactggggtgagaatcattgacgtaattgtaagaggataatattcaggaaatatggagataaataattttcttctcgacattaaaaaaatctaataaaaagttttatcttttcccctaactcagggtcatcagccttcaagcttcagtctctgtgtgttcacaggtgctgtaaacacacgcatcactactaatatcccacttcagtgctattgctgctcccaaaactccaggtatttttaaccttataaacctccagaataatgagaccactgggttcagtaaattgctttgttttgaagcagtattagacaaagtgggagactagaagataaatctgtcaatgacatgtcctttaagactacttagattttgttgaatttgtggatcattccttacttgagcaaatggtaaattaactctctcttttctctctctctctagctggcacactttttccagtagccattctacttggtatgcttacttatcagctgtcctccaggggcctcacattagatgtttctctgactaaccaaacatgacacacagctgaagtcagaaaaaccagattgataatttcactcaaactattttccttcattctaacaatttactggagtacacaattgtgactatttttagccataggaactcatagaaagaccaacttcattagacctacaaaatcgaattgtgtaacagtatatgcagtatgtgtaggaataaaaagcatttctcaaatatgcagtactggattttgcaaaagcaccttacacttagctataaaggagtggaaaacacaaagatgagtaactgcacctttcaaaagactagagctataccaataatacaaaggtgtaaacaaataatgatgagatgacaaaggctgagtgttttctatttggaagctatgttgttgagttatttatgtatataatttcatgcaatcttcatgttatggggatgttctaatccactgtgactctgtccttaaataaaagggagatttggacatagagagaggcacacggggaggatgccatatgagaattgacactgtgctgtcacaagccaaggaactactggaaggagagaaagaggactggaacagttccttccttagcaccttttcaggcagcctagccctgccagcttcttgatctggacttctcacctctagaattgtgaggcaataaatctctgttgcttaagttacccagtttgtggtaccttattacaggagccctaggaaaataattcattatataatctgctaaggtagatctgatcattgtctccaatttccatatgaagaaactatgcctcaggcattgtgtcagttgtccaaaatcatacattcctgactcacttcaatgaattcctcattcagcaaaatttttaaggtaccttaaaaaaattatgttaactcttaaggccttgctttaaagcttcaatgggcttttcctttgcaaagaataaaatcctaatacttaagcatagctctctttcctggctatgtttctgacatcctcttgtaccatgctcctccttaatcattctgaggttacatcttaagtcctttccccttgccattcccacttcttggaatactttcccatcaactcttcaaagaactgccttctttaagtatttggtctcagttcaaatgtcacttccctgtaaaagcttcctggccatcaagccttctttacacactctattttattttttcatggttcctataacaacctaatatattctcaattgattaactgttttgctgactactgccttccataagaatggaaagaaaacgtggccaggtgcagtggctcacacctgtaatcccaccacttcaggaggctgaggcaacatggcaaaaccttctcttcaaaaaattttttaaaagttagctggatgttgtggaggcaagaggatcacttgaggatcacttgagtccatgaggtcaaggctgcagtgagtcatgtttgcaccactgcactctagcctaggtgacagagctagtccctatcaaaaaaaaaaaaaaaaaaaaaagaatggagagaatgctacatgagagaaaggatcttatctatcacgttcacctcccaagaggtgaacatatcccccaaagcctgatagagagaagatgctcattaatatttaatgcatgaccatgtgcagacttgggaggaaaaatatgcctcagcctatcaatattggatccttaataaacaaggatgtttctgcatcatttccccacaacaccgaacaagtgtggctcactgtggatgtttaagcaaatgcattgtttttccagttatatatctggtagagattaggccattgataggaatgggaagacgatctccttttattttgatgacccagcatggctgaacactcagtgactaccactgcactttgttgtactttcagcattagagatgccagccctgtaggatataaaacaggaacatctagtcctcaattatattcagaattactcaagtcttagaagcaccacttgtcttttttcaagggagagaaatgctcaagtgatgggctgaagtgaagggagggagtcactcacttgaatggttcccttaggctgtgtggatgcaaacagcattagacaatgacactgacagtgggaaatgcactggagacgatgattggcaaagccctccttttctccccatccactatagatactgacagcaaagggtttgtcacaatgacaactatacactcccaatatcacagaagaaggaggaataaaagggtatattatgagtgactgaaatttagaataaattaataaatattatgtccctcatccatagaaaccacaaaggtctagtaaggctaaggatataacaagaaaataatatgaatatttgcttccccttcctagtgtaatagagtaagttacaaatggcttcaggaaggggagagaggaagaagagtggatgagatacgtaagagtgcttgagggataattttatgaaagctttgggaagttttaagaaaaagaaaagctatttttcaaggtacatgtgtgtatgcgtgtgtgtgtgtatgtgtgtgtgtgtgtgtgtgaaagacagaagaaagagggagacctaagaagactatgagacactaagagaaaaattaaggtaaaaaagacacacacttagaaaaacacacataaggaggagggaggaggttaagacattttactatgtgctgtgaatggaaactacaaaccatttttgatatatgcaatatatatacatatatacacacatatacatatgtatttaaatatttaaattacattttctctttttttagagatatggtttcactatgtcactctgcccaggctgcagtacagtggttgttcacagtcatgatcatagcacattatagccttgaactcctgggctcaagcaaccctcctgtattagtctccccagtagttgggattactagcatatgccaccatgtccacctttatgctttttaaagtgaaaaaccatactaagaatgaggcagctcaacttaataataaaaacatttcaaatgtaaagaaatttacaaaagaaaaacaatcaaccccattaaaattgggcaaagggaatgaacggacacttttcaaaagaatacatgcatgcagccaacaaacatacaaaaaaaaagttcaacatcactgatcattagagaaatgcaaatcaaaaccataatgagataccatttcacaccagtcagaatagctatcattaaaaagtcaaaaactaacagatgctagtgaggctatggagaaaagggaatgcttatacactgttgttgggtgtgcaaatcagttcaatcattgtgcaaggaaagtgattcctcaaagagctaaaagcagagctaccattcgacccagtaatcccactactgggtatatacccagatgaatataaaccattctaccataaagacacatgcatacaaatgttcattgcagcactgttcacaatagcaaaagtatgggatcaacctaaatgcccatcaatgacagattggataaagaaaatgtggtacatatacaccatggaatactatgccgccattaaaaaatgatatcatgtcttttgctggaatatggatggaccttctattatccttagcaaactaatgcaggaacagaaaaccaaatacagcatactctcagttataagtgggagctaaatgatgagaactcatgaacacaaagaataaaacagacactggggtctacttgagggtggagggtgagaaacggaagagaaacagaaaagataactattgggtactaggtttaatacctgggtgatgaaatgatctgtacaataaccccctgtgacaccagtctacctatgtaacaaatgcccctaaacttaaaataaaagttaaaaaaaaaagaaaattaaaatctccttatcatctacctggtaatatgaaaaacacatatctttcattcattcctttcaactgatgaggaaactgaggcattgggagttagtaaaagtccacattgagatatgagacccaccactggctggacacagtggctcacacctgtaatcccagcactttgggaggccgatgctggtggatcacctaaggtcaggagttcgggaccaggctggccaacatggtgaaacccccatctctactaaaaatacaaaaattagctgggtgtggtggctggcacctgtaataccagctactagggaggctgaggcaggagaatcgcttgaacccaggaggtggagtttacagtgagccaaaatcatgccattgcactccagcctgggcaacaagagcaagactctgtcggggaaaaaaaaaaacaaaaaaaaccaccaccatcattttgcaagtgttaccactattgtgtgttaatattgtagaagtattcctaattatgatttctttgtattcctaattgtaatagctttgtatttgaaaaattattgattcatactctatatgttattattttgtatgcgatgacaacagaatatattatcatgctccttttgtgaatctcattcataatataaagtataaatttgtgattttgctttaatttgaaatattaatttcaaatatgttatcacaatttgatacaaactattgacagtaaatctgtggattaagtaatgtcttagtaggtattgggaaaatttgaaactagtaacatggaggactattgtcattgtttatttcaaagccagttaaaattctgcaaagcagtgtacataaaaataatttcaagaaatttataaaataccgagattatggtgtataaacaactttagattctttgtttaagaaatactgccagtttgtaatatatgcttcattcaaagtagctaagggctgtacctggctaatagtaggcacctaatatttgttgaaaaggaatactgagtagctgggacctcctgagtagctgggaccacacacatttaacctgtatttataaaattactgtttagagaataacatttgatggaatcatgcttttactttctgcttacgactcaattgtttgtactgacattaacatcccaaatccttagcatggcctacaaggccctgagcaatgtggcacctgctgaagcctgctgcctcatttaataactctttgtctctttcccagatccagccactctaacattttttagctcctggaccaagacaagctcttcccagaacctgagctttgtacctgttctttattcctggagtatttttcccctgacaaattacttatcatctatcataattcaggttaaatggcactaactcagggaaggcttccctaactgtctcccttctccaaccaaattaggaacaattatatggccacatagtatcgaatcaagtttataattttaaaataattgggagattttgttgtttaacacttgttttcactataagactgtaattacatgcaagtaagaaccatgcctgtttgttcactcctgccacagtcagaatagtgcctggaatatgcagtaagggctgaacaagcactaaataaatgaacaagtgaataaatggatattgtctcattttcagaacagagtactaaatggatcatgaacactatctggtatgtcacgtaggtaatttacaagggctacaatttcagctcagatttaccttttcctggatacaggtcttgataggtctcttgatgtcatttcacttcagattcttctttagaaaacttggacaatagcatttgctgtcttgtccaaattgttactaagaatcaagagagatatctgacatgaaatgacattggaaaacattaaacacgattgaaataatgctagccaatatggttactattagaaaccaattacattttcaacttaaaaatagtaatacttattgcagactcaaatgtgcttattctaaaacaagtaaatgtttgcctatggtctgagattctaatccacggagttcattctaatccacattcaacactatcatgtaccagtgggcctcataacccacctagccctgtgatttttcaggttcacttttctaaacttgtgaattaaatatttattttcttagttcagaagaggaaaaaaactcttgtaattgttgcccatttcaggagaaatcttgcatatgaaaacaagagataaatatacacaactgagggctgtggtttaaacaaaatcttgagaatgttttttgaccttatacatttgtgctttagtataacaaaatgatatagacaaaggtaacttttaatagaaccagtcactaaattaaaaaaatgacaaattcttctgcttagctaagcaacagagaaggtaaaatactaattcaattcatcaatttaagcaatactcattaagagccaagtatgtgcttactgaataagctgctaaggtttggtggttacagagtgtgcg

SEQ ID NO: 45333 - DNA, 7742 bp, Homo sapien
cgtttgtatatgataagagagccagagtacaatttaggagaagaaattgtatggaaggaaggttcatttccattagaccagaaaagacagcacatttgaaggcctgaataagaaatattctggataagatattgtggctgctaccagaatggctcttgatgatctctacctcttggtatttatacccttatataatctctttcctatagtgtaagctggtcccaggtacttgtttctattgaatagaatagaacaaaagaaatgagatgccacttctgagattagattataagatactgtgaatttcttcttgtgtcctctccctctctctctttctcttgccctctcatttgaatgaagccaactggcatgctgtcagtggcccagtgtaagtcctgttacaagaaattgatgattacctgtagccaaccctaagtgaagaactgaggtcctcagtcctacaaatggagagaaactgaatctagctaagaaccatgtgagtgagctgggaagaagatccaccctcagttgaaatttaagatgacatattgagcagacatactgagacacactgaaagtaagagagcaggaggaaacaaaaccagggtcatacaaagaacacaactgattttgagattctcacataagtattacaccttcagtgagcacgtgtactagaaatttaaaaaataaataaaataaaccttcaaagtgagctagcaaataaatttccctatggtctcagctctgagtggagagagaaaatgttccctgtggagtttatagccagaatccagctctcaaacaggtttcagcctgaactcacacaatctgtgtggcttccaaatttgcaagctgagaatttaattcaaagtggtctcaggttgatagcagtccaaaatgctaggtaggaaaaaaaatcctctctggacaaataaatcatcaaagcaagctcataagagcaggtttcaaaggtcatgagcttctaacacacacacaaaaatcacacacacaaaatgggggtagcagcaacatgggtagcgtattcaaacttgaaaagactttaaatatttgtattattagatgtagattatgaaacacatattttaatgtggttaatttttttaaggaatcaaaactatgagtaaagaccaagaaaattgtgctggatggccacttccaccatggctcccctcctatttaagtctgggtactgtgtcacccgaagtcttcaggcacattgttccaggtctgggtttgcctatgaaagaaactcatgagagctggaaatgaggagtgaagaggaggtcttcaaataaagcaggcttaaggattagacatagcaggtttgacagatgtgatggcttgcagaatcctttatgagctcccactgtccatctggataagatttacagacctttcagaaattcctataagcttgggttctgtgcccacactctagactgtcaggctaagatctctgatataaaacagacctcttctgattttgtctagctgcttttctaatatctattcaccaagctcttccaataatagcataaggccctaattaatattaaacttttatcattataatacataggatgtcttctgttttcctgatcaaattctgactactattaaaatataaagaattgtccagaaatatataaaaaaagaatcacacattggtcttctttaaatgaaaatataacaattgtatggactaggatgattacagttgttcagttctgactgttatttgaagaaaaaagcaataagaagcctcagcaacttaacagaaggagctgccatttactaggagaaaagattgtggatgagagtgtagcaaaggtcagaattctgtgaagcttgagatgtttattataatgaattatcttttatactcactacaatttcctaacaattttggggtttatatttttgaaagagatatacctttaattttctttctttgtactattgttaggtaactttgatgtgcagattatactacagtgaaagttgccaatgacaaggcaaagtcacttacatcagacccaaagcaaagtggagccgggtcatgaaaaaggggatcttgtgtgtctgtccacgataagcactatcacaaggactttccataaactcacaagaaatttctgcccacccagcacactctgtttgtccagctcatcctgtaggtgtctctataataggacctatcataaaaaattcctcaagactgcagcatttcagataagccaccctcacaagaacacttgcctagcaatggctgtttctgccagtaagttaacaccagctcctgcatcagaccctgtgaccaatgatgtttgtttcaaaacagcttgcatggacttctttttgtctttacatattttccttacctcaacctcttgggatgcacctatgattgatcatagcacaaatatctcagattataatccttgtttatttccaaataaatttatttctttggagatccactttttctgttattatacattgacattgttattatgaaattggttgggtgatgtgtcttattttcttgtctccagaagaatttctgtaacagtgcaattaaacgttctttgcatgtttgctagaactcacctgtaaaattgtctgagcaaccaaagcctggtttttgtgtttagtttttcttttgtgattggggaggggggtttatcgtactgattcaaggtgtgaaggtaacatcattttgattttatacatcttcttcagtccatttaagcatgttacatagcgttgtttgttcttttcatgatattctttacagtagtctcctaaatgttccctctgcttctgccatgagcccctacaatctatttcaactcagaagctatagagtttgtttaaaacatgtaacatattatgccacctttcttactgtaaaacatcccatggtttctcgtagtatttatagtaaaagtgaaatttttatgatggcttgagaaacttttcccattagatgcccaagtgctggtctggtctgatcttctcatcttcccttgggtgattctgtggcagtcacactagcctccttgctgctccacaaaaactccagcatgatcctacttcaggatatttgccattgttactgcatctgcctggaaccttttctcccatataaacatagagattgctcttgcctgtccttcaagtctattcttaaatgtcccattctctgtgaagctttcctgcccaccctatttaaattacagacttcactcccaattccccatctactttaagagtcttcatttatcattccttgacaaactgtaaatatacatgttcacttttttatcgtctgtctccaaatactggaatgttaagttctgtaatgtcagatatttctgtttggttcactggtgtattcttaaagcatgttacatactaggtatactcaatgaatatttgttgaataaatatcacattgggcttattccagaaattcaagcttgtttcaatagttagagcaatctacaaatgtaattccttacattaactaattaaaggagctaaatcacatcaccaccacaataatgcagaaaaccacatttgatacaactcaatattcatgtctgcctaacaaacatctcatgatactaggaaaagaggaagggatatattattttcatgtataaagcactaaccattgtagcatgccaatatactcaaaattcaatgaaattcctatcaaaatcttagcattcctcttagtcctcaacaaagcatttctaaaatgtgtatagaagaccaaagggccaaaagagtcaacttctgaagaagcgcaaaaagaaagttgaggaaatcttaaaacatgttattgagcttaaagttgcaaaaataaactcatgtaccataattcatgagtagaaaaatagactagtggaataacataaaaataaaaacaatgcttacataaaatgttgtaactgatttggatgtcattagaaatcagtaagtaaatagatggacaatgtaatgaaagatgctaggcaaataatgtggtagggagaataatggccctcaaagatgcccatgcctaaccctggaacctgtgaatatgttacactgaatgcaataaaggcttatcagatgtgattaaggatgcaaaccgagatggagagatcttcctgggttacccagatgggcccagtctaatcacatgagttcttaaaaatggagaacctttcttagctgagtccagagagagatgtgacaatgaaagaatggtcagagaaatgtgacattgccagctttaaaaagagagaggagaggcaatgagaaaaggaatgctgatgttctctagaagatagaaaaggccaggatatggattctaccctagccaccataaagaaacatgcctgtcgacaacttgattttagttcactaaaattcatgcctgatttctgacttgtgtacactgtaagatgacaagtttgtgttattttaggtcacttagtttgtagaaatttgttacagcagtaatagaacaagtggttatccatatgaggcaaattagattggatacctatctccaatagaaatcaattcaaggtgaattccaggaaaatacttaaaacatttagattaaaaataaatgagaatttttgttacttttggtaggtcatagaaccaagaaaaacaaacattaaggaggaaaaatgaacatatgactacatcaaaatataaagcttctctatttggaagatatcataaggtgacaaatcataaactgtaatatttacaacatatatataagtgaataaatatacatttagaatatatatgaactcccaaaaatcaacaggaaaaataagacatagaacaagcaaaatgcataaacaaaagaaggcaaaacaaaaataatgactcataattatatgaaaagaagctcatcttcatagatgagcagataaatgcaaattaaaaccaccctgagatgctttttacatccatgagcctgataaaagttagagtctaaaagtaataattaacaaagatgggaagtaacagaaaatcttgtccgttactggttaaagtataaactgatacagctactttatagaatattacattatagaataaagttgtgagtatgtatatgcagtgactcagcatattcattgctagtatgtactcaagagaaacttacaggagtggactaggaagtaaatacaaaatgattacaacattgtttgttatatcaaaaaataaaaaagacacccaattttccagcaaaaaaaataagtaaaaataaatcctgttgtattctaacaatggaataatatatagccattaaaataaatcaactattactgtacatatgaatgtaagtatcagcaaaacatattgtttagtgaaaaactaagaagctgaagaagaatatatacaatatggttacatttatatgaagtccaaaaacttgcaaaataaagaaatgtatttagaaatagattcacatgtgagaaaactagaagaaaattaatgaaaggataagagggatagcagtaattctgagtagttgagggaatttcaattggaaaaaaataatatcatattctttaagtcaggtagtgggtattagcatttgttttaccatcgttctttattcttatagctacactatatattttcaatgtatttaatgtattttttgcataattaaatattatgcaataaaaatgagaaaacaaaaaagtagaaaatgataaattacaataaagaaatggagaaaaaattataatctagttgagtaatggtatattacatagctattttcttaagtagatgtatgtacatgatgtatgcacgattgtacatacatgttcttaattatatataaatatatatgtacatatttttaatataaaatactaaacaaagtacaccaaaatattagctcctatgttagtgagataatgttttgtttttttgtattttaagttttacatagtaggtgtatttttctgttttcatactgctataaagaactgcccaagactgggtaacttataaaggaaagaagtttaattggctcacagttcagcacagcttgggaggcctcaggaaatctacaatcatggcggaagacaaagaggaagcaagccagcttcttcgcaaggcagcatgaagaagtgccgagcaaaggggaaagaatcccttataaaaccatcaaatctcgtgagaactcactatcacaagaacagcacaggggaaactgcccccatgattcaattacctccacctggtctctcccttgacctgtggggattatgggggctatggggattacaattcaagacgagattcaggtggggatacaaagcctaaccatatcagtaggcatgtattgaattttaaactcagagaaaaatactagtgtttttataggattcttactaaagaaaaaccagaaagtaataaaccatctacgctaagacataaaattcagttgtttagttacaagatagaatgtggccttgtaagaaagcaaattaacttctaacatacaaagccttagagaagattcaagtgactgacggatcttaaacagagctattattacaacttgaactgcagtaaaatatcctcagcaacatagatgtgtgtgtttcactagtcagagcaatacaaatttaatgaaactccattggtggtgtttttaatcagacaatttctgaagatgtcctggcttattcacagatgcaagccaaatctctagaagagtaccataataagaaaaaaaagaatacaggcaattgagagctgttccaaagtttagggagtttttgtaaggaattaattaataaaaatgttcttgaaagagagaaattaatatgcagttcatactgccagaattgcaggcaatttatcaaagtcccctaatcctccaaaatcgctattttttttttgacacacactttacagtacagaagaaaatgtctccggcaataaatcacaaagttaaaattacctagtctacaattaactacacagtgatggtaaatcattttctaccaaaagaaagaaatgtcttgtctattcaggttctgctctacttaaaagttttccttgttggcgagcaagtggttagaaaatcatattttatacgtacattcagcttaactatcattcagctcaggaagatgactcagggccttatccataccttcaagtttgctcttagcaagtaattgtttcagtatctatatcaaaaatggcttaagcctgcaacatgtttctgaatgattaacaaggtgatagtcagttcttcattgaatcctggatgctttatttttcttaataagaggaattcatatggatcagctagaaaaaaattaagaggaaaatcacatggaaagttatatatctattatatataatattatatatctattatatattatatattgtatatctattacatatataatattatatatgtattatatatattatatattaatctattatatatataatattatatattatatatcatttccaaattccccagcgttcatatttgtcagtgcaagtaaagagccttactgctgatgaggtttgaggtatgaccatttggccagaatttatgaactctacatgtcgcttgatgtgtgcctcagggtatactttttttttttttttgagacggagtcttgctctgtcgcccaggctggagtgcagcg

SEQ ID NO: 45334 - DNA, 2632 bp, Homo sapien
cgggaagggaaaccagcactgtacagacctgaacaacgaagatggcatattttgttcagggaatggtgaattaagtgtggcaggaatgctttgtagacacagtaatttgcttgtatggaattttgcctgagagacctcattgcagtttctgattttttgatgtcttcatccatcactgtccttgtcaaatagtttggaacaggtataatgatcacaataaccccaagcataatatttcgttaattctcacagaatcacatataggtgccacagttatccccattttatgaatggagtgatgaaaaccttaggaataatgaatgatttgcgcaggctcacctggatattaagactgagtcaaatgttgggtctggtctgactttaatgtttgctttgttcatgagcaccacatattgcctctcctatgcagttaagcaggtaggtgacagaaaagcccatgtttgtctctactcacacacttccgactgaatgtatgtatggagtttctacaccagattcttcagtgctctggatattaactgggtatcccatgactttattctgacactacctggagttagcacagaccccacaagttaggggctcagtcccacgaggccatcctcacttcagatgacaatggcaagtcctaagttgtcaccatacttttgaccaacctgttaccaatcgggggttcccgtaactgtcttcttgggtttaataatttgctagaacagtttacggaactcagaaaaacagtttattttctttttttctgagagagagggtcttattttgttgcccaggctggtgtgcaatggtgcagtcatagctcattgcagccttgattgtctgggttccagtggttctcccacctcagcctccctagtagctgagactacatgcctgcaccaccacatctggctagtttcttttattttttgtatagatggggtcttgttgtgttggccaggctggccacaaattcctggtctcaagtgatcctcccacctcagcctctgaaagtgctgggattacagatgtgagccaccacatctggccagttcatttcctattactggttcattgtgaaggatacatctcagaaacagtcaatgaaagagacgtgcatgctggatgcagtggctcatgcctgtaatctcagcactttgggaggccaaggtgggaggatcgcttaaactcaggagtttgagaccagcctgggcaacatggtgaaaacctgtctctataaaaaattaaaaaataataataataactggtgtggtgttgtgcacctagagttccaactactagggaagctgagatgagaggataccttgagctggggactggggaggcttaggttacagtaagctgagattgtgccactgcactccagcttggacaaaagagcctgatcctgtctcaaaaaaaagaaagatacccagggcaagttaagttcggaggggcacagagctcccatgccctctgttgaacatgcgaccctcccagcatctcctgtgtccagcaaccctgaaagctctgcaaacccctttcagggtgtttatggaggctttattatgcaagcatgattgataaaacctttggctgttggtgattaagtcagtctccagcccctcttccccctggagttcagtgcatgaggctgaaagttccaagcctcttaccatgtggttgcatggtaatcagccctcctcttgaagaaatttaggagcttgcagtcacccagtcatctcaacaacatccccaaatgcattcttaccatgctggagatcccaaagttcttagaggctcttgtgttagaaacctgggaccaagatcaaatattaaaacaaaagatgctcctgtcacatctatcactgaggtctttgtaagagctttagaagctctgtgccaggaaccagggacagagattaaatatatatttcttttcttttttttgagacagaatctccctgtgccatccaggctggagtgcagtgatgtgatcatagctcactatagctttggccttctgagatcaagcaatcctcccatctcaacctcccaagtagctaggactacacatgcatgtcacccatgcccagatcatttttgtagagtcagagtttcaccgtggtggccaggttggccatgttggccagatggggtcttcttttgttgcccaggctggccacaaattcctgggctcaagtgatcctcccacctcgtccttgtagagatgagatttagttacgtcgtccaggctgatctcaaactcctgggctaaatcgattgtctcacctcagcctctcaagtatgttatgaaggttatatgttaggaagggtcccaggaggtagacccacacagatgggatttgggcataggtttggtttcccagggggcagtgctgagctctttgccagtgggaaatgggatgctggtgatttccagtaggtgacctcacagtgactcaagctaccacttactgttgattgtgacgaaatgccagctgaggcacatgccttgggagctaagtggttgctgcccttgaccactgtgaagactggtgtgggaagggtcgttttggatgcacttgagcaggggtccccaacccctgagccatggagc

SEQ ID NO: 45335 - DNA, 1810 bp, Homo sapien
cgtgagtaagcatggattttggtatatgcagagatggggggctggaactaattctgtatactgagggacgacgactatatgtttttacaattatgctgtgggatacatactgttgcatagccttgaaaataataacttttaattgagtggaataagaataatattgataaaagtagcagctggccaggtgtggtggctcacactggtaatcgcaacactttgggaggctgaggcaggaggatggcttgaggccaagagtttgcgataggccttggaaacaaagggggagtcaccatccctacagaaaaatacatgaattagcctagtgtggtggcatgttcctgtagtcccagctacttgggaggctgaggtgggaggatcacttgagcccagggaggctgagactgcagtgagtcatgatcaggcctctgcactccagcctgggtgacagagtgagaccctgtctcaaaacaacaaaaaagtagcagctaacatcaactgaccttttaccaggtgcctattgataccatagtttaatttcttataactgtttcttatttcacttaccaactctgtcttcagttactcccagatttttactgtgtgtgtacagatgaccttttgtttagattgaattgtctccccagaagtaagattactgtgagtcatggtgaatggacattctccttacccttgatgtaaattgacagggttttgggtgcctcccagctataatcttagcactttgggaggctaagagaggaggattgcttgaggccaagagttggaggaggcagtatggcagtatggtgagaccctgtctccattattttaaaaaattgacaggctttacccgggaaggcttatacacaatttaaacacccctcatagtataagaaggtgcccatttcactgcacctttgccagcacagggtattataatttagtaagtcattttttgtttgattattttacatagacaaaagaactcatattactttacttgtcacatttcaacatctttcctcagcttattagctctatttcttttctgtctgtaaatggttgttgctgttttggtctttgagacagggtcttgctctgtcaccaggctggactgtagtggcataatcatgcctcactgcagccttgacctcccaggctcaaacttcagcattccgagtagctgggactacaagtgtgcaccaccacccccagctaacttttttcttcttttggatagagacagggtctcactctgttgtccagaccggtctctagctcctggccttaagcaatcctcctgcattagcttctgaaattactggaatttcaggcatgagccaccatgcctggcctgggctagtcccatattctctagagttctctttactctgtgctagccaatctctcattatgctgttcacctgttataatgaataattctctgtattaaattttaccactttaaacttttgagtggtttatgcttcctgattggactctgactaatatgttaggaagggtcccaggaggtaaacccacacagatgggatttgggcataggtttggtttcccagggggcagtgctgagctctttgccagtgggaaatggggtgctggtgatttccagtaggtgacctcacagtgactcaagctaccacttactgttgattgtgacgaaatgccagctgaggcacatgccttgggagctaagtggttgctgcccttgaccactgtgaagactggtgtgggaagggtcgctttggatgcacttgagcaggggtccccaacccctgagccatggagc

SEQ ID NO: 45336 - DNA, 1610 bp, Homo sapien
ggaggatcacctgaggtcaggagttcgagaccagcctggccatcatggcaaaaccccatctctactaaaaatacaaaaattagccaggtgtggtggcacacgcctgtagtggtggtgcatgcctatagtcccagctactcaagaggctgaggcaggagaatcacttgaactgggagagggaggttgcagtgagctgagatcgcaccagtgcactccagcctgggcaacagagtgagactccatcttataaaaggaaaaaagaaagaaaagaaaaattccatatctgagtgtttactcctgagtttttgagattgttattaagatcgtgctctactgtgatgatttgggtttgtttgataatcagaaaaaaagcgtattcttttaggtgttcagccacactgctttggtgtcacaactgcacattggtttcacagctgcaggacaagttcgagcatcttaaaatgattcaacaggaggagataaggaagctcgaggaagagaaaaaacaactggaaggagaaatcatagatttttataaaatgaaagctgcctctgaagcactgcagactcagctgagcaccgatacaaagaaagacaaacatcgtaagaagcaatagtttctcttactattctgagagccttatcattctacatcccatcttcctgtgagtttgtctttgtagcatttaactctaattgcagttctcattttaaaaactggcttgcttattgtatattttccccaactaaagcgtgaactcctagcagggcgtggtggctcatgcctgtaatctcagcactgtgggaggccgaggtgggtcgactacctgaggttaggagttcgagaccagcctgaccaacatgatgaaacgctgtctctactaaaaatacaaaaattagctaggcgtggtggctgggacctgtaatcccagctacttgggaggctgaggcaggagaatcacttgaaccctggaggtggaggttgcagtgagcagagatctcaccattacactccagcctgggtgacaagagcaaaactgcatctcaaaaaaaaaaaaaaaaagggggtgaacttgaaggcaggtcctgtgtccatcttttcagattctgtatcccagcacttaggacatagacaaacacgaagatgacaatcaatatttgccaaaatgaaaaaacaaaagaaacatgtaacatcatgtaaaagaagctggttaggtggagaaatttatttaccatagtcttgcttgtggatccagtagtgacttttacagtttgtatctaaatagaagctggaggctttgttggggactcataggcataaaatattatttattatagagttaaatgctacaaagacaaatctaattaataggcctattttcctttttaaattctactcataatttcttcatagtttttatgataaaaggttggattttgattagaactcccatgattttgtgtcagaattaaaactggtattagaataaataattcaaaagctagagaaagagtacaaagagaagccatgagttgcatttgaattataatattatgtcttacagatttggggtatatgctaaagttaccaaagttgtagaaaataaggc

SEQ ID NO: 45337 - DNA, 6070 bp, Homo sapien
gatcatttgaggtcaggagttcgagaccagcctggccaacatggtgaaactccgtctgtactaatagtacaaaaattagccaggcgtgatggtgtgcacctgtagtccttgctactcagaaagctgaggcaggagaatcgcttgtacccaggaggcagaggttgcagtgagcagagattgtgccactgcactccagcctgggtgacagagtgctatgagtcaccacacctggtatgagccaccgtgcctggcccacaatgacttttacacatgttgttaaatcatcttacagattttataatttgggggaagaaaagttttactaaatggtcttttaatggaaactctacaagaaccagaatctttgctttgttcacttatgtatccattcctaggcctagaaaaatgtctgacacatagcggcaattattcattgaataaatggacccagcgatagtacattagctatgctatatgcatacattaaagatgtagattatcgactttcaaaagataattaatgtaacttcttactgcttctgaacatgtttgtgagttatattgctgagggacctttatcttctcattctttcatcttaacccagtgttataaaattgaaatcaccaatattattccatatctaaaattaatatctaccttgtaaaaaatatcactctgctgcatttgagaatagactttttaggtaataatgatgcaatccatagggtttttgggggcacagagggattcatgctaacagaacattttattttctattttcccagagctgtaaaacatgaaattacggtagtataaggcatatttttactctttttataattttttctaaaaaaaattagtgtttgttccctatataacttttaactttataggtaaatatttgtttctttcagctccagttttatgtgaaatagagttttcagatttatgtagcatggaaagttttaatacgtcagagttactgatttttgccaatcattttctcaattatttcttttttatctttagttgatttttttgtagtgacacattttgtttctagtctcatttccttttgtttatattctatatatatttcatttttggttactatgagaattacatataacatcctagagttataacattttaatttgaatttatttcaacttaagttcaatcacataccaaaattctactgctatatatatagctctactctttttatgttattgatgtgacaaattatatctttattcattgtataccagctaacagatttacaattacattttatgcatttgccttttaaattatgtagaaaataaaaagcagagttacaaaccaaaattacaataggactgtttttatgtttatgtatttacctttaccagagagctttgtatattcatacagcttgcttatttacttacatagttattgcctagagttcatttatttcaacctgaaggacttaacacttcctgaatgtcaaattcagggataaatggatttttttcagttttaaaaaaaaatccggaaatgtcttaatttctccttcatttttgaaggataagttttccagctatatatttctcaattgacaggtttcttcattattttaaatatataatccactgcctactggccttcaaggtttctgccgagaaatcagctgctaatgttatctggatccctatctgtgagagttgctcttctctctgagttttcaacattctcccattatcttttttttgtttgtttttgagacaaataattgtacatattcatgggatacagagtgatattttgatacatgtatacaatgcccaatgatcaaataaggataattagcatatccatcacctcaaatatttgtcatttatttgtattgtgaacagtcaacattctttcttctagttttttaaatttataaacatttaaattttattacagaaatttaaattttttgattctgaaaaagtcatatatgtatgcaacattttttatcatttatttatatatttatgcatctttccttttagttttgacagagattttctattttatcattatttcaaaagaactcttacctgtatttatttatcaagtatatttcccttgttttttcctagtatattaatttatttacttatcttctaaaaatcctccatataatctgtttattttgtttcctttctataatttcttcaataattagttctgttctattttccattaaaatatttaaatcttgtatgaatttttgtcagattagaaatttagggcgtttcttaatttctctatactctagcttttgactttttttttctgacctaagaggtatttagagcacattttagattttttattttgactaatcatttaaaatgtatactaatcttcaatttaaataaaaaactggtctatagtgacaaaaattacaaatgagcctaactaataaattatcagctgtgtttatatgtataagcatgcacagattttggtaaatatgtacatagtatattggtgagcttatttttatcattcttaactcattgtgtagtctaaacgttggggaaaaaataaaatacaataatcagatggtgtgaataagaaaattgttctaatgtttgtaaaccaagcaactgttttaactgctcccctcttcctgattgacttctaaaagggattgatccatattgggtcctatcatatacgtcacggtataacatctccagctataaaatggaaatttgagaataactttgctgctactcagatacattttatttcaaaaacatacactaaggtgttgctgttggatctttccaaaaacatattcacactgaactttcaatcacactgagccatatttgaacaatctttcaaggtcagctctggcataagctaacattataccatttaactcagaaatttctttagtatttgattaatgggtttatgtttgatatgtaatgtaattttctaatgctaaatcaagtggtaattttgttagtcaagttgatttagtggcttgggaagaaagcttttaatgttcccctaatttttcttacctttgacatgatccttcacatgtcttattttgcttagtgatttttcttttttttttttttttttgagacagggtcttactctaccacccaggcttgagtgcagtggtgcaatcacagctcattgcagccttgacctcccagactcaagctattcttccacctcagcctcccaagtagctggtactacaggcacatgccaccaaacttggctaatttttgtattttttgtagagacagagttttgccaaattctcaggctggtctggaatttcttggctcaagtaatcctgccttggcctcccaacatgctgatattacagacataagccacagtacctggccagttttctttttaaaaaaatctattggttattaatttgaagccttccttttcatagctgtgctccttaattgggagcaaacatgaatggaccacaacttagccaattttctatatacgatctttgccatcctaatttaaaggaatattaattctttcttttcctctttcattccacaaacctgtattgactacatctaagttctaaatggtgcactggatgttgaaaaagttgatgatgagcaagaacaaaattcctgctttcaggagacttacagttcaatatgggaaatataatttgttaaaatataaaagtgcaattgtgttacatgctgtacgaagtacatgttgacatgtgagcatataataaatgggctggaggccagaggattgccaaagagaatgggcctcctgctgagatgaaaagttgagcagggattagttggcaaaagtggagggacgatcctttctaggcaggaggaagaacatgtacagaatctctgaggtgtgatgcgacaaagtctatataaaaaactgaagaaaggtctaatgtggcttaaatacagaagctagtaggagaggagtcgaaaagaggctggagaagtagaaagtgtctgcattctgcaggaacttatattgtataaaaagaatttctctttattctaagtgcaatgtgaagccaatgaagtgctttaaacaggtgatgtgatttgattgaatttattacttcacttaacaaatattcattacatgcccactgtttgtcagatattgctgtagcccctggtgatacagtagggaataaaacaggcaaaaatccctgtcctcttgcagcttataatggactgcaatgtttaatatgtcagaggaggtccacggaggagtgacttctaagcaagaatctgaaaaaaatgaggatatctaaggagggaacaaatggttcaaaagccctataattgcaagcaggcatgatgaagcaattgcagttgtcctgactctcaacaccgtggaactcaaaggagatggaaagattccttctctccctcatatattttctctctttctgtctatatatatagaatatgagacatttccctaatcattatgtgtaattacaattacatatatatatgtaattgtaattacacataatgattagggaaatgtctcatattcttctactcagaaataagcaatatagcaattactgttttttacattttacagttacagtttcagagaaagtttgatatttatctaaaatttttcaatgtatgaactttttcatttgacaaaccataattgtacatattcttgggatacagagtgatattttctttacatgtatagaatgtgtagtgatcaaatcagggtaatttccactaatttaaaatgccacctttatgttattgtaatttatatatatactatatatacacacacacacatatatatatacatgtccacatacagtgtgtgtgtgcacatgtacacacatgcatatgtgtatagaatgcccagtataagcaatgtgcacaaataaaattagctaacagagatagtatagagtgagaggagaggcagattaatctttgaggaaaagcacaattttatagctgaatggagaaagctgaggtggtttctaagatggagaataagacgaaaaatgtaagtacgttgtttgactgaattcaagaaagaagggtaaaagagaagaaagtagtggtcttatcattaaatgccacagagaggtaaagataaagacaacatattgttttgggtttagtaatttaagggtgaccaaattccgttttggaggaggaacagattccatgtccactagaatggaatgaacaagaaatggaggaggaaaataggtagtttttcaaaagttttcaaaaatatgaaaagaagaaatgaagtggtacttggaagagattgttgaaatgggagagactatggtggcttgtttagaagcagttgagatagatccaattgagatagagatattgactatataaacaaaagaatgacaaattaatagtgtaatggataacttgactttggcaaatattgtgaatttttgtgaaagtacaactaaaaggcaatgtcactccaataatcaccagagtaatcaatttgcttattgctgtccctttaaatatagttctctggtatcaactaacatgtttttaactaatgatgcttcttaaagaaaagggaaaagacctttttctttctttcagtcttcaatgattcactgcttcatctcgctccaccaaagataaatgaaatctacatctcttatacattaacaatgcatgacaatttacaaatagctaaatttttggagctaactttaagtacctgaatggaatttaatcaacccactaatctccttctcacttctcagttatttatcaagtttatgtcaagggacaaggaaaaattatccaaacattgtttaaaacaatcatcattaattagtaacacttatccaggggggtttttaacctttcccccactcaaggattattctaatgtcagagtagaataaaaaataagtgcagcgatgctgactcttccaagcttaacatttctcacaagtcaattagctttgtactgggaggagggcgtgaagggctgcttgcg

SEQ ID NO: 45338 - DNA, 2054 bp, Homo sapien
cgttggttccaagatgtagaaatggaagcttcaaggcttttaacatctggacatcaaaactggaagttttactttcactgtattttattggtcaaagcagtcaaagagcccacccaggttcaaggagaaagaatatgtccccacgttttcaacgggatggtgccacaaaatttctagtcatcttaattcaccacagatagaaatatgaagagctcatttgttatgttatttgtgaatgcagactaaagatatttgttggtttatatagtagtgggaaaatgagaacttttaaaatattcaacttttagcccttgacatgcaaaatgagttcattacatggtaaggatgagggagaaagaaaagatctgaaaaagtagaagagtgatggattcagaaagtataggatgattgtcagtgtgattgttttatctagccacatatagctgtgtggtatcaagatgtagaaggcagagagtaggatttatcaggattgttgtttggaagagtgagtacaatcattacgaggaagcaaggtattgatcatggaatataaagtgggaaaagaggtaaggtaagaaggatatcagtaaagtgaatgacagcataaatatggtagaaccgttggattggtggctctggaggaattgaataattattagacttgaagcattagatggtgcattagtgagggcatctccaactaagtctaccatcaagtcatggtgatttattatctcaaatatatgacaaatttatctacttatttccaaaactcccatatctagtttaagtaatcaaatttcttgccttggcaagcatgttgctttctaattgactcacctgtatccaatttgaattccttaaaatccattctatacattgtaaccatagtgatatttacaaatgtgaaatctggtcaaatcattcttctgcttagtagtcttggatttctcattctcttaggaagcatcttccactacttatttcagcattatctgcacaatgcttcccctcacttcctcacaatgtggtttcaggcacaactcccaaggccccactctggcctcggggagcagattgttccccctgcaggaaaacctttgttctccactcagttaactgctgtttaccctttagatctcagcttcagtgttgctttcttaggggaaactgactcacatcaaatccctctcttatagtaattttcattgtatttcagagtaatttttatggttgcaattttacatttgtgtgattgtttgattaatctctgtctcctccacgaaaactccaagatgcaggaactatatcttactggcattcagcacaatacctggcacataggtgttcaaaaaatactaatagggtaaataaatgaattaattttatgcttttattttaatattttcatggtattaatatttctctctatgtgatattttgtatgtacctattttcttttaatttgaagatttatagtttagttatgtgctgtataaattatatttagttctttaatttttgtgttatttccaagggtgctctccattgactcttttaatatagttccactttaccccttaaacccactttcctctcccaccttcgtcatccaactttatttgattttgttatttttaatttttctaataatgacctttatcttttaaaataatatttaatcacccataacataatttgttgattctctcccactgtgaaagttgaatggaccagaatatatttctactatctttctcttcttatttttgttatgaatataattagtctttatacagttatggtttgtaacatttgcattctgttctttaaccgcaaaccccagaacattttgatattaggcttcagaatgctcacttgtatcatgttatctctattcatttttagtggatagttttcttttttaagtttttctgatagagatggggtcttgctatgttgcccaggctggtcttatcttgaactcctgggctcaagtgattctcctgccttggcctttcaaagtgttgggactgtaggtgttagcccctgcg

SEQ ID NO: 45339 - DNA, 1927 bp, Homo sapien
cggtaaattcagttgcatctgccttgatgtggtcatactataacacattttttctggataaagataagccctttaaccattagattcaatgttttcttcatttcagaaaagttttcttttatctttgaattttttaaccagatattgtgagctctttcacactaatttctcatttgttggacctgactttaatgttacatttcaccttcttgtgttttctatttcgttttgctcaggatatatttaagcctgtcatttatattcttatctgtgtttttagcagcattattctctccacttcccactttttttcctgcttttattgatcttcatttctttcatggttgtctttactcattacatcctgaattttgccagtttattttttatcactttattttgtatttattttcaattatgtcttctaaatatcatttcagagagaaaacattttagagaaggcatatttttaaaaaacatagaaaatttgatcctgttttttactgcttcatggtataatttgtatgttctgtaccttatgtaattttccctttttcttctagtatttttataaaggtcatcaagttttatttttgtaatacaattattataaataattatataatattattagtctttgaatattctagatacttgtgaaaggatattgtggaggaggagctgggggtagtaagtatgatggaaggcagacgagttttggaatcttgtctccaaaacactctcatctgttagaatgactcctaggctataggattgactatggcttagagtggattcatagttgttaatttcatcatgtgacttgtgacttatccttttcttttcataatagaatgaaaattgccatctgtctggcttcttccccatctttttgccttctttcattacaccacacacgtgtcctaattattccaaaggtgatacatttgcatgtttccctttaaactcctttccctctgtcactctgtggagggttcacatgctgcaatatttctgttccaagtaaagatcacaggttttgatcctcagtcctcagtatacacacctcttttagggatttctgggcttcttgactagctcaagctcttcagaggcatgcactttatcttggtgttcagtcttgactggtttaaacttttgatgtccagaaggttttcttcatgtgttgttgtgtggaattgtaaatattttctagcttttgtaaggttgtggctcatatttatatttctcctggtttgaaagaagagagagaaagaagtatgtcaaattgagactcttagattggaaatctgaatttatttacacgattgagattgatctagagttttattttttctgctgtaactgaaatttggattcaagattatatgtgttttgtgaatatgtttggtaacattgtgacttttctataatttagggaagtttgatgtaggagaaagagaaaaaatttttgagagaatcctaaattcatatatggcctaaccttttaatatctatgtaattttagataataaataatttgtttgagattatgtggctctaacaacacctgcttcacagtgtaattatgaggatttcatagaatttgtatagtgagcattagttttgatgttactttaaacctctttgccttatacattctattttttccatggaacattatatgatttcatgtccacatattaatctcatactttcaattacattttatgtttaaattgaatattatggtaatcgttatgtaaatgattaaaaatttaaagggacaacatttaatgttgctctggaattcacctttagtcataaaataaagatttaaagtatcatctgtagacaatggcaaaagcccttttttgtcataagaaaatcaaatatgctttatttcacccaattaacatggctatcc

SEQ ID NO: 45340 - DNA, 7293 bp, Homo sapien
cgtccatcagtctatcaaatgcctagaaacctttcgccctttgtcaccttctgtgtcacccagcattccccttctcagcccttttcattctcatggtggaatccttttggtttgatttcaagggtccagcactgttgatgtcacaacagagtggcatggaaagtttctgaaaattttgtcatctaacctctcgtggggacttttaattaattcagcttttgacaactccatcacattcattatattatccattcattcattcattaatacatttgacatttataatgtgtgccaacaatgtgccaggtcaaaactgcccacttacaatgtagaacatttctgtaaattttatttcaattttcttgtatttcttctcctttattctaccatcccacttgatcttctgccacagaagttctcttctctctctctttgttctctcttctcctcctttattcttgatacctgcttctgtgttggctcctctaggccagcacttgtcctcctacctctgtgatgttctgtctagtttattgattccttttcctactttacataatcaatgtggatagtttctatagttgggtctttgctttttaatctttttttcctgtgtattatttccttcagggaccttatgcactcttacacatccgtctattatttttatatggattactatacaattacatgttgaatttgtacttttcccccatatatcctgtcatatgttttcacctgagcatctcaatatctaatactcttatttgcttaaaatacacgtgattattttctccaccctgacatattttatgttcaactttctaatttctaaaaatggacctaccattgtcctatttattcttgcttaaatcttgatattttctttgagttcatgctccttcgtattcactccagctgtgataagtcaccaatcctttgggtttttacttaccagtatttctatttctgtttctatagccttaaagctggaactgtgtagtcccagttcctctgtgtagccccccaagtctgctctatttcaatcttctcttaagggaactccttccctccgtttttcttttcctccatttgatacatcgcacttatagatggggcatcttccctaattactggcttcatcctcaattcccgggacccataccttcactggctccctaaatttatttaataattctcatatacctttgagaagtttctaatgataggcaacaaatgaatattgactacctttcttattttcctttcttcaccaaaatgatttttaggatgtagacaatctgtatgcttcaacatacaccaaacttaccatttttgaaatattttacaatctacttgaaaagacttctttagaccctatattcatgtattgtaatatttatcctcttttatggctatactcaaatgccacatcactatagtgccttccctcatcactgtagctatctcttttcactctacttatattgtagaggatttgttacacttcttaaactgctgatctcaagcgatttgcttgctttgacctcccaaagtgctgggctgacaggcgtgagccactgcacatggcctgatttgttccacttctactatatgcatcacacatgcctgatgcatattttaatgcacgttggataaggatcggctttgtacgacttcagtctttcttgatgtgtgacacccacttctattttggctccactttaacaaaatgaataagtgagaaggtaatactggaaacagaacataactgtgactaggaatttggtcttgactcgccatttaattttctgatatgcatgactgttttcttcacatgtgaaatttaacatgaggttgaaactggagaattttatatttttcatgaaaaaggcaatttgggagaaaagtccattttcctgaggataaggtattgtatggtttgactgctttgccttggctggtcaacacatttgtacacctggataggcacagttttcagaaatcctttcaagcatctaccaattctcctgtctacaagtttaccttcctcccatttctcattcctaatgacaagggaaatatccagtgttatctgaagtggtcataaaagacattttttttctttttatgtgaggaattgaaacttatggctttagattatggggcttaccatcaaggaaagggcgtagcgtggtcagaggacaaaacttcttcctgcatttctcaggaagtctttgattagtgtgtccacctaggagcaattttttttttggggggggtgctgggaaatatacttaagtgattaaatccaagtgtagacatgagagctttacctaaagccaggtctaattaccatacctgagaatcagggagtatttaaaatttgagaaataattttctatacttgaaagtcacttatgtaggtaggcctcagattataataaataacgtttattgtgctatactatgtggtaggtatgaggttaagtatttttacctatattatatcacttatttcttacaaatggagcaagggagcaagcaagcaagggaggtattattatccctattttatgtatttatgtatttatttttgatttctattcttttggtttttttgttgttttttattgatgtatcatagttgtacatgttttggggtacatgtgatatttttgatacatgtatacaatgtgtaatgatcaaatcagagtaatttggatattcatcacctcgaatatttatcttttctttgtgttgggaacattataatttttctctgctagctattttagaatatataataaattattgttccctatgatttctccattgtacaattgaatactaaaatttattatgtctatctacatatccccagttcaataactataatttctctgctgtgcaatcaaatactagaacttcttccttcgaacgctatatccctaattcaataacaagtaaactgaagctcagcatggtctaggaactttgttacgttaacacagcaagtgagtgttgcagcctggatccaaaaatcaggcctggtcgacctcaaagtccagattattgacctttctaccataatgtatggaggtaagtttgtgaatttattcaaaaatcaggcctggtcaacctcaaagtccaaattattaacctttctaccataatgtatggagctaagtttgtgaattttcatagttttaggatttgaagataaaagaggtgaaaatttggaaatggtttctggacttttgaattttggcaaacagctatgtgataagtccaccctgcagacccacaacttttggaaataactctactgtgaccttcagtagcagaagctgctcctggggtggtagaacacaaggaaaacacacactagtaaaaatttcatgtgccttctttgttctgtacatgtgtttctcttgattagtatatggtagtatcctcaaatcatagtaacaagtatactttttccagtgaattgcatgtgtatattattgtatagtataaaaggcaatatttccatttattatcatctgtgcttttcaaagaaactctgtgagtccaacagggcagataatagaagcaactgccctttctctcccccgttaaatgcaacccaatgtcacagtccgtagcatccccagatgagtgtattaaaggtgagaaattcccaaagtcaaactcagtagcatccttgaatgagtgtattaaaggtgataaatttattttatttatgttctttttaacctgtgttctcagaaacagagactactgtatttcatcctaccttagtcttgcttagcagtttctcttctcctttgaggctcttttatttttaaatcattgttcatatcttctaatttcccctttctcccattctttccatatttttaatctttttttaactttatctctgttctgctttttctgtatttcaaattgatccatagactttagaaaaatgagttgaatgctggctgtaggctgtcttatccccagcaagaaacatgttgtaaagtcttagtaccttcccactggaagatcattagtcatggctactatgtttttaaatgagaattgttttaattatgcattttaaaattattggaaaacatgagggagaggaatgaaccataagtaataaagattattgacttgaagttaagaccttactatgatctgggattattagtcttacttgtcaatcaagaactatccactttctatttgtttgtgggtatctaatatggttatatacacagaagtaatgataattgatatgaaaaggtctcctcctgttatatcaatttaggtatttttcacacattgtgtacctcattcttctcctattcaattttcactaattcctaaagggtcaggtcaatgtccttggcataacctcctccacctgttcttaatggcaattgtatcttctgccctccaatatctataacacttttttctttaaaactctttgaatgtttatcttaatactcatttgatatatattgtataccacatatgattgtttgttatatgtacaatacatgttttttcaactttttttggttctttccatttacaggaattagagaaagaactaatcagtgtgaaggagaattgtcagtaaaattacaagaaaagattgagatcataattgacctttgaggataataaaatttaaagaccaaaaggatggacttcacagaaacatgaccttaggttgtttttgcagttgtagtaactggttatatgaccaacaaaatatgaagaatgggtaaacaaattctgatagtaatgatcagtcactttgcaaatataaagttactatttactactgtattgtacaggttcaataatctttgtgtacacattttatgtatttattgtcaggctgctatataattcagtatttataatagatactatgtatagcaatctatggttagttttggtcttaaccaggaaaaatcactcttttgagttttgctgtttttaccagattatttttactggatgattgctcatattatttgattattattgcaatttgtctttctggaataggaagcaagaggcctgaattctggttcctattctatcaattgtgtgaattctggaaactcagtttacttttctgggcctcatggttttcatctgaatgatgaccaacttggataaaatggtctttatataattccataggcatttcccttcccaagggcttgagtctttttcaacaattatagagttttccggtccctcttcccagtgcctcagcaccttgctattcatgttcatctgatcagttgtttgcatgctgacttacattaccctgatgggcagtacctgtggctgtttctgctccctcacccagtccataggcttctggttgtaaaaagtgtgcatcttgagactgtggacagttagctccagaggtgacagtataatcacttcacgtagaagaggatagagagagactcatgccagtggtggtgagcaagtattagagatatgatgtgtgcctctgtgagttttggggtctaagataaattatggcactaggaagatggtcctttgtgtcagaagaactggagttgttggtgcaaaaaagtatgatgtcagcatagcagttttatttgtacctcagcaacttctaaaataatctctattaagtgttttcaggaactactttctactataggaaaatgattgaggtgagtatccatctggacacagagaaatataacactgttttctgctcaccctccacttcacatataaatacaatatgtgttaaaggactaaatttctagtgtcacagtttgtactttatagtttgaagtcaataagaaagctcatataccttcctaaaagtcacttgttaatgtttgatattaatctaattttatcataaattaaaagtataaaactacaaatttcttaaagataaaatatccgaatggattcagtcaaattaagcatgataatatcaaatatcagaataggttaccatgcaggaggtactgagtacttaaaagggtggggaatgcaatgaacataaaagctggtaccaaggggaggaggagacagtgatgaattaaaacattatcttaactaatccaagtgctggtcttcaatactttcatgtgtatagacaaagagaaactgcagagatttctcacaacctctgtgtccattttatgcatgtatcttagcagaaacactggtgaaatccctccaaaacatatttattaggcatggaaaaagccttacatgacaggtggcataggctccttatgaaatcattgcaggatgggaagccatttagggcttcataattgtgaaagattgtatagaaactgaggcacttaaatagcagtaagcatgagaaaatgtggtagataatggtggtgattctatttcttgtgaaagtccacttactctagtctgctacagttgtgggctttccgatttcacataccccagtctctatattctctcaatccacagcctacctcaactaagtccgtcccaggcacctcttactgcagtgataatccatctgttaatcatgttttcctcttatgtctactttctgtcagagaattgtgggtgcaaactgggaagggaaggaaattataagaatatgtataagtacaaatggaatatgttggaaatgaggaatagttaatatcacaggtcatttaaacacctgatgaatttcatggatagtcaggaatcttgttcttacctaatctgttaattttagatcagacattacactgaaagtattgatgatgggtttaaatcaggttgcagctcacatgttgtgataatattatgttgattttttgtttttaatatgtgaggaacagaataactgtatactatttattcatagtgacattgcaatattgattttagtacatattattatcttcataatcacaatttcctccccattttcttagttctcataattttagccacagcccagttggctggaccaatggatggagagaatcactcagtggtatctgagtttttgtttctgggactcactcattcatgggagatccagctcctcctcctagtgttttcctctgtgctctatgtggcaagcattactggaaacatcctcattgtgttttctgtgaccactgaccctcacttacactcccccatgtactttctactggccagtctctccttcattgacttaggagcctgctctgtcacttctcccaagatgatttatgacctgttcagaaagcg

SEQ ID NO: 45341 - DNA, 4079 bp, Homo sapien
cgtcgttggtggtgtggagatggtgctgctcatagccatggcctttgacagatatgtggccctatgtaagcccctccactatctgaccattatgagcccaagaatgtgcctttcatttctggctgttgcctggacccttggtgtcagtcactccctgttccaactggcatttcttgttaatttagccttctgtggccctaatgtgttggacagcttctactgtgaccttcctcggcttctcagactagcctgtaccgacacctacagattgcagttcatggtcactgttaacagtgggtttatctgtgtgggtactttcttcatacttctaatctcctacgtcttcatcctgtttactgtttggaaacattcctcaggtggttcatccaaggccctttccactctttcagctcacagcacagtggtccttttgttctttggtccacccatgtttgtgtatacacggccacaccctaattcacagatggacaagtttctggctatttttgatgcagttctcactccttttctgaatccagttgtctatacattcaggaataaggagatgaaggcagcaataaagagagtatgcaaacagctagtgatttacaagaggatctcataaatgatataataagcccttctcattaaacatgatatggctttatgtttctttctttgatattttagattcaggaactatgagacattatgtattgatttgaatgttattagacctgtaacataattcttatctgatgaatatatgatgaatatattccttgttcaaaatgagtcataaattcaacacatctctacatctatattatgcccatttaatttctttcagcaatgttttgtagtttttggtgaacaggtactttatgcatatgtactttatatttatctctaagttttatatttctgatgcccttttaagtgacatttttatttcaatttacaattgtttattcttagcttatgggcacataatagatctttgtttgacattatatcctgtaaacttgcaaaacttataagttccatcagttttttataggttatgtaggattttctttatagatgattatgttgtcagtgaataaagacatttgcttttaaaattctagtatgaattcactatattcattttgttgaatgctgagtagaattagttagagtagacatctttgacttgttcctgttatgaaatatattaaatatttcatcattaagtataatgttagctataatttttttcataggtactctttaacaggctgagaaagttttctgtattcacagtttgctgaaaatttcttttatctttagtcaggaatggatcttggattttgtaaagctttttcgtttcagaatcagggtaatgctggccctttagaatgagttgggaagcatctgctcttcttaaattttctgccataattttgtagaattcatataatttttttctttaaaaagggaagtacttaagtattttttcccataagttacccataagtaaatctaaaggaaagtgggaaactttgatacgcattggttgccccctggtggagatttctgggttcttgattattttaacactggagatagaatctggtggaatgacgtcaatgctaccgtgattaagaggtgtgtaggaaatgcttcatgtaaaagagaaaatagtctttatgagaatctgcctggtggaaaggagttggtgcaacaataacaatataaattagtgaaaaattttaaattgacaaataataattgtatctatttatggggtacaatgtaatgttttgatacatgtttaaattgtggaaagattaggtctatcttattgacatacatatcttttttgtggtgaaaacatttaaaatctactctgttagtcattttgaaacatacaataccttgttatttattacagtcaccattctgtgcaatagttcactgaaactttgtctaactgaaactttgaacccttttatcaacatctaccttttccatgtctacccccaactactagcctctgataatcaccattccattctctacttctatgaattcaacttttttagattccacatatcagtgagatcatgtgatatttgtcttttcgtgcctggcttatttcacttagcgtgatatcttctgggttaattcatgttgtcacatatatcaggttttccttcctattaaggctgagtagtattccattgtatatatacactacattttcttcatccatttgtcagttgatagacacctgtgttgatttcatatttgggtattgtgaataatgctgcaatgaacatgagcctggagatatctcttcagcatattgacttaaattcctttggatatatacaaggaagtgggattgctggatcatatagtaattctagttttagttttttgagtaacttttatctatttttcataatagtattaatttacatttccaccaacagtgtacgagggttcccttttctctgtatcctcttcaacacttgttatcttttatcattttgatagtagccattctaacaggtatgaagtggcatctcactgtcattttaatttgcatttccctgataattaggatgacaaactttttttatgttagtcatttgtattttttttgagaaatgtctatttaggaccttgcccattttttgacttggttatttgttttcttgatattgagttgagtcccttatatatttggagattagcctttcatcagatgtatgctctgcaaatattttctcacaacttgtaggttgtctcttcaccatattgtttcctttgctgtgcagaagctttttagtttgatgcaatcccatatatttttgcttttgttgcctgtgctttgggggtgatatccaagaaatctttgaccaaaccaacattgtggaacttttcccctatgttttcatctagtagttttacagttttatgtttaaacctttaatccattttgaattgatttttgtgtatggtgtgagataaggatacacaccatacacattcgtgttcttctgcatgtggatatctagttttcttaacaccatttattgaaacaaatgtctattcttcattacgttttctgggcacctttgtcaaaaatttattggtcataaatgcatgagtttatttctgggctccttattctgttcccctggtcaatgtgtctgtttttgtgcaagtgtcatattgttttgattactatggttttgtgatatgtacttgttttgggggggatcgatttttatttgggtttctcacagtggttagagaacaaccacagcacaggaaatgcctcaccaagattgcccagaaaactgaccagctgcatcttattgcttaaaaatacacatattcacaataactgacaaatggtgatgtgcctcacacaggaatgtgttcacatttgcaatgctgtgtacagacttcacttcgttcaacatagattttggtttaatggaattcaaatgcggatgcttgttcacagccttggatttgtctgtttttggagagatacaacctccatgagtatatctgcatgaaaaccacagacaatgaaggtatttcttcattgatttatttattcttttgactgtagtaacaaaccctggatgacacccttccttttaattcacctggaaaccagactcaatcaaatctccctggtcccctcactattccttcaaattccctatttctatctcttcctgaggagggtaacctcctgtagcaggggtcagactgtgacttgggaatcaagcttaggtctgcaggttgcctgttcatcttcttgtaaaatattgtagaacactgcagtgaatccaacagttaacactcagagcagttccctgctctaactcaggaaagagacttcagagggtcaggattcatccatttgatcagttaactgagaaggattcattttggtaaaacttgttcagctttgagacacttcagtgagttgtttgagatttttttttaaattatattttaagttctggggtacatatgcagaacatgcaggattgttacataggtataca

SEQ ID NO: 45342 - DNA, 5640 bp, Homo sapien
cggtgtgttgtgttcccctccctctgtccatgtgttctcattgttcaactctcatttatgagtgagaacatcgggtgtttggttttctgttcttggattagtttgctgagaatgatggtttccagcttaatccatgtccctgaaaaggatatgaactcatccttctttatggctgcatagtattccatggtgtatatatgccacattttctttatgcagtctatcactgaatgggcattttggttggttccaagtctttgctattgtgaacagtgccacaataaacatatgtgtgcatgtgtctttatagtagaatgatttataatcctttggatatatacccagtaatgcaattactgggtcaaatcatatttctagttctagaaccttgaggaatcaccacactgtcttccacaatggttgaactaatttacactcccaccaacagtgtaaaagcattcttatttctccacatcctttccagcatctgttgtttcctgactttttaatgatcgccattctatctggcgtgagatggtatctcattgtggtattgatatgcatttctctgatgaccagtgatgatgagctttttttcatatgtttgttggctgcataaatgtcttctttagagaaatgtcagttcatatccttcacccactgatgggtttgtttgttattttcttgtaaattgtttaagttctttgtagattctggatattagccctttgtcagatggatagattgcaaaaattttcacccattctgtaggttgcctgttcactctgatgatagtttcttttgctgtgcaggagctctttagtttaattagatcccatttgtcaattttggcttttgttgccattgcttttggtgttttagtcatgaagtttttgtccatgcctatgtactgaatggtattgcctaggttttcttctagggttttttatggttttagatcttatgtttaagtctttaatacatcgtgagttaatttttgtgtaaagtgtaagaaagggatccagtttcagttttctgcatatggctagccggttttcccaacaccatttattaaaaagggaatcgtttccccattgcttgtttttgtcaggtttgtcaaagatcagatagttgtagatgtgtggtgttatttctgaggcctctgttctgttccattggtctacatatctgttttggtaccagtaccatgctgttttggttactgaagacttgtagtatagttcgaagtcagacagcgtgatgcctccagatttgttctacttgcttaggactgtcctagctctgcgggctcatttttggttccatatgaaatttaaagtagttttttccaattctgtgaacaaagtcagtggtagcttgatggggacagcattgagtctataaaaactttgggcagtatgtccattttcatgatattgattcttcctatccatgagcatggaatgtttttccatttgtttgtgtcctctcttatttccttgagcagtggtttgtagttctccttgaagaggtccttcacatcccttgtaagttggattcctaggtattttattctcttagtagcaattgtgaatgggagagttcactcatgatttggctctctgtttgtctgttttttgcatataggaatgcttgatttttgcacattgattttgtatcctgagacttttctgaagttgcttattagcttaagaagattttgggctgagaccatggggttttctaaatacacaatcatgtcatctgcaaacagagacaatttctttctcttgcctgattgccctggccagaacttccaatactacgttgaataggagtggtgagatagggcatccttgtcttgtgctggttttcaaagggaatgcttccagtttttcaccattcagtattggctgtgggtttttcataaataggtattattattttgagatatgttccatcagtacctagtttattgagagtttttagcatgaagggctgttgaattttttcgaaggccttttctgcatctattgagagaagcatgtggtttttgccattggttctatttatatgatgaattatgtttattgatttgcgtatgttgaactagccttgtatcccagggatgaagccgacttgattgtggtggacaagcttttgatgtgctgctggatttggtttgccagtattttattgaggattcttgcatcgatgttcatcagggatattggcttgaaattttctttttttttgttgtgtctctgccaaattttggtaccagaattattctggcctcataaaatgagttagggaggattccctctttttctgttgtttggaatagtttcagaaggaatggtaccagctcctctttgtacctctggtagaattcggctgtgaatccatctggtcctggactgttttttggttggtaggctattaattctgccacaatttcagaccttgttattggtctattcagggattcaacttcttcctggtttagtcttgggagggtgtatgtgtccaggaatttgtccatttcttctagattttctagtttgtgtagaggtgtttatagtattctctgatagtagtttgtatttctgtgggatcagtggtggtatctcctttatcattttttattgcatctgtttgattcttctctgttttcttctttatgagtctggctagtggtctatctattttattgatattttcaaaaaaccagctcctggattcattgattttttttgaaggtttttttgtgtctctatctccttcagttctgctctgatcttagttatttattgtcctctgctagctttttgtatgctcctgcctcttgagttcttctaattgagatgttagggtgtcaattttagatctttcctgctttctcttgtgggcatttagtgctataaatttccctctacacactgctataattgtgtaccagagattctggtatgttatgtctttgttctcattggtttcaaataacttatttatttctgccttaatatctttatttacccagtagttgttcaggagcaggttgttcagtttacatgtagttgtgtgggtttgagtcagtttcttaatcctgagttctaatttaattgcactgcgatctgagagactgttatgattcccatttttttttgcatttgctgaggagtgttttacttccaaatatgtggtcaattttagaataagtgcaatgtggtgctgagaagaatgtatattctgttgatttggggtggagagttctgtagctgtctattggatccacttggtccagagctgagttcaagtcctggatatccttgttaactttctgtttcgttgatctgtctagtattgacagtgggatgttaaagtctcccactattattgtgtgagggtctaagtctctttttaagtctctaagagcttactttatgcatctgggtgctcctgtattgggtgcatatatatttaggataattagctcttcttgttgcattgatccttttaccattatgcaatgcccttatttgtctcttttgatctttgttggtttaaagtctgttttatcagagactaggattgcgacccctgcttttttttgccttccatttgcttggtaagtattcctccatccctttattttgagcctatttgtgtctttgcacgtgagatgggtctcctgaatacagaacactgatgggtcttgactctttagccaatttgccagtctgtgttttttaattggagcatttagcccatttacatttaaggttgatattgttatgtgtgaatttgatcctgtcattacgatgctagctggttattttgctgttagttaatgcagtttcttcatagtgtcaatggtctttacaatttggtatgtttttgcagtggctgataccagttgttcctttccatgtttagtgcttccttcaggagctcctttaaggcaggcctggtggtgacaaaatctctcagcatttgcttgtctgtaaagattttatttctccttcacttatgaagcttagtttggctggatatgaaatcctgggtggaaaattcttttctttaagaatgttgaatattggcccccattctcttctggcttgtagaatttctgctgatagatctgctgttagtctgatgggcttccctttgtgggtaacctgacctttctctctggctgcccttaacattttttccttcatttcaaccttgctcaatctgatgactatgtgtcttggggttgcttttcttgaggagtgtctttgtgatgttctccgtatttctgaatttgaatattggcctgccttgctaggttagggaagttctcctggataatatcctgaagagtgttttctaacttggttccattctccccatcactttcaggtacagcaatcaaacgtagatttggtcgtttcacatagtcccatatttcttggaggctttgttcatttcttttcattcttttttctctaatcttgtcttcttgatttatttcattaagttgatattcagtctctgatatctttcttccgcttgatcgaatcagtgcttgatccttgtgcatgctgcatgaagttctcatggcatgtttttcagctccatcaggtcatttatgttcttctctaaactggttattctagttagcaattggtctagccttttttccaggtccttagcttccttacattgggttaggacatgctcctttagcttggaggagtttgttattacctaccttctgaaacctacttctctcaattcatcaaactcattctccgtccagttttcttttgttcccttgctggtgaggagttgtgatcctttggaggagaagaggcgttctggtttttggaattttcagcctttttgctctggtttctctccatcttcatggatttatctacctgtggtttctgatgttggtaaccttctgatgaggtcactgagtggctgtcctttttgttgatgttgatgctattcctttttgtttgttagttttccttctaacagtcaggcccctctgctgcaggtctgttggtgtttgccctaggtctactctagaccctgtttgcctgggcatcaccagcggaggctggagaacagcaaagattgctgcctgtttcttcctctggaagttttgtccaagaggggcacccaccagatgccagccagagctctcctgtatgaggtgcctgttggcacctactgggaggtgtctcccagtcaggatacacgggggttagggacccacttgaggaggcagtctgacccttatcagagctcgaatactgtgctgggagatctgctgctctcttcagagccatcaggcttttcaaagatgctttaagtctgctgaagctgtgcccacaggcgccctttcccctaggtgctctgttccagggagatgggggttttatctataggtctctgactggggctgctgcccttttttcagagatgccttgcccagagaggagaaatctagagaggcagtctggctgctgtggccttgctgagttgtggtgggctccacccagttcaaactttctggtggctttgtttacactgtgggggtaaaactgcctactcaagccttggcaatgtggaagcccctcc

SEQ ID NO: 45343 - DNA, 1238 bp, Homo sapien
ctgcacccactgtccaaccagtcccagtgagatgaaccaggtacctcagttggaaatgcagaaatcacctgcattctgcattgatctcactgggagctgcagactggagctgttcctatttggccatgttgccagcaaattctgagattttttttaaaagtgcaaagaaagacatctgaggggtgctgacatattcgggtcacctcaagccacatgccagcttgcttgcccctgttggattcagcagagggagataggccttgccatacctgtggtgtctgccaaagcttcctcctggcaattcttgggagtgctgatacctgggccacagttagtccaagtttatcactgaagatcctatcaaagttttgtctgaaattccacttttgccttttgtcctaagtggttgtggacatctccaggggctgataccaaggactaggaacagctgagggaggcagaaaggttcagagtacatctctatttacagggaacagaacaccggcctccgagagtccatggagcaatgggaaaattgcagtgattactcatcactgtgaaacttctactttgaatacagtatcttctggcaagcataggggactgcagtcgacaatgctgctgaatatacctgagtacatagtaagacatttgtttggtaaacagtcaatgcatacaataaattaccttgagagggccatctgtgctccagatgtgagagttcatgtgaatagaatggccgcaattcaaagaatcttcacaggaaaacagggctcagagctcatccacaatggacagacagggagggaaacaggtggaggttagttcaccacttcctcataagaaggtaataaatagtttggtgaaataaaatggtagcactgagtaattgcgggcttctggataggcaggcaggttgatttcatgttgctactgctggacttgagggctggcttggctgtggtggcagacacagcagcagctcaggatgatggtgatggtccacgcgagccagaaccaccaatgttcatagtagtagttacaacactgagactgcccatagcagtgtcctgttgtgtcacagatgtagctttgattgttggtacacacacaggcttccttatcctgtgggggttcagccctggctgacacagggctgggcagtgcctagaggtgcaagagctccatgccacccaggagtcttccctccttactcctcctgctcctccgacccagcg

SEQ ID NO: 45344 - DNA, 4860 bp, Homo sapien
cgttttgaagtcagattgtgaggccttcagctttgttcttattgctcaagagtgctttagttattcagggtcctttgtggttccatataaattttcaaattgttttttctatttctgtgaagaatgacattgaaattttgataaatgttgcattaaacctataaatcgctttgggcagtaaggacattttaagaatattaattcttcctacccatgaacataaaatatctttccatgtatttgtgtcatctacaatttttcatcaatgttttatagtgttcagaatacagatctttcacctccttggttaaatgtactcctaagtacaatcctaaatgtgctcctaaacaaaaaaaatacagtttttttgatgctactgtgaatgagattgatttctttatttttgtcatatagtttgttgtgagtgtaaagaaactactgagttttgtatattgattttgaattctgcaattttattgaattcatttatcatttctaatagctttttggtggagtttttagggtttcctatatataatatgtcatcaaacagagacaattttacttcttccttttcaatttgaatatcttttatttctttatttggcttaattgctctggctaggacttccagaaataagttgaatagaagtagtgagaataaatatccttgtcttgttcttgatcttagcagaaaagatttcactttttcattgttgggtatgatgtgagctgtgagcttgttatatatgtcctgttttgtgttaaggtacatgccttctacgcccaatttgttgagaggttttgtcatgagaggattttgaatttagtcaaatgctttttctgcatatatagagatagctatttttttatccttcattctgttaatgtggtttatcacatttgatttgtgtttgctgaaacatctggaggataaatccactttatcatggtaaatgttctcctaatatgttgttaaattctgtttgctagtacttattttgaggacttttgtatctatgttcatcagggatattggttggcccatacttttcttatagtgtccttgtttgcctttttatttttatttttatttatttattttttaaattatactttaagttttagggtacatgtgcacaacgtgcaggttagttacatatgtatacatgtgccatgctggtgtgctacacccattaactcatcatttaacattaggtgtatctcctaatgctatccctcccccctccccccaccccacaacaggccccagtgctaatatccggaatctacaatgaacccaaacaaatttacaagaaaaaaacaaacaaccccatcaaaaagtgggcaaaggatatgaacagacacttctcaaaagaagacatctatgcagccaaaaaacacatgaaaaaatgctcatcatcactggccatcagagaagtgcaaatcaaaaccacaatgagataccatctcacaccagttagaatggccatcattaaaaagtcaggaaacaacaggtgctggagaggatgtggagaaataggaacatttttacactgttggtgggactgtaaactagttcaaccattgtggaagtcagtgtggcgatttcttagggatctagaactagaaataccatttgacccagccatcccattactgggtatatacccaaaggattataaatcatgctgctataaagacacatgcacacgtatgtttattgcagcactattcacaatagcaaagacttggaaccaatccaaatgtccaacaatgatagactggattaagaaaatgtggcacatatacaccatggaatactatgcagccataaaaaatgatgagttcatgtcctttgtagggacatggatgaagctggaaaccatcattctcagcaaactatcacaaggacaaaaaaccaaacagtgcatgttctcactcataggtgggaattggacaatgagaacacatggacacaggaaggggaacatcactttaaaaaaaaaacaataatgctgatcttttaaaatgagtttggaaatactctttctccttcaagtttttggaagaatttcagaaggattgtattattattttttaaaatgttagaattcagcaatgaagttttctggtcctgggatgttctttgatgggagatgttttattattgatatactctccatactcagtattgttctgttcagattttatctttcttcttgactttctctaggtaagttgcatttttctagaaatttatctgctttttctaggttatccaatttgttggcttgtaattgtttatagtggcctcttatgatcctctatatttctgtggtattagttgcaatatttcctctttcatttctgattttattgctttgagtattctctcgtttttctagtctagctaatggtttgtcagttttgtttatcttttcaaagaacaaattcttagtttcattgatctgttctattttctttcacagtctttttgtatttgaaggacttgtatttgttaactggctcaagcctggaaatttgttgaggtgctatgagtctctattgctctcatttctcttcactagacatagaaattttctgattacacgaatcaaataagactaataagcttcccagggatgaatcccacttaagcatggtgaatttttttgctgtgttttcttaaaaataatatttgctaatatttggctgagggtttttccatctaagttcatcaggagtattggtctgcaatttatttttattatagtgtccttctctggttttggtatcagggtaatgctggttttgaaaaatgaatttggaagtattcctcttcttcatgtttctggaagcgtttgagaaggattggtgttagttatctaagtgtttgttagaatccagccactgagccattcaatcctgggtctttcttttatgagagacctttcattggtgatttaatttccttattcacgatttgttctaaattttgaattcttcatgattcagttttggtacgagtttatcaatttcttctaggttatctaatttgctggtgaataattaattatagtagtatgttatgattttttaacttctgtggtatcagttttaatgtctcttctttcatttctgagtttgttttcttttttcttagtctatgtaagaatttgttaattttgtttatcttttcaaaaaacaattcttatttttattgaaattttcagtttctattatattatttctgctctgatctttgttatttgtttccttctgctatctttgggcttgtattgttctctaattttctcgctcctttaggcataatattaggttgcttatttgagatctttttttcttttttgatgtaggcatttattgctataagtgtccctcttataactgcttttgttgcatcccatatgttttagtatgttatgtttccattttcatgctacctgattttagaatatatttcaaagcatggtgtacagtgcttttaaaaagaggctatatataggtatatataaaaacaatacacacattgtatataaactatggcatgcttgtaaagaaaagagaacataaagtgtctgaggaaataattagaagaacaagaggatgcaaaggggtctgtcaaagattcagtgaaatgagggtttttggatattcacagctaatagattaatgcattaggaatgagcaaaaaaattgatggtagtcaaacagagggagggaggtagattttgaatgattcaaagcaggagtgttttgaagataaacagaataactaaaaagaaagactcagatgaaaagcctagatttaaagcatttgaatcaagaggtggtaatctaggaattaggttgatttcttttttttttaatttgtgtagctttttattttattttttattatactttaagttttagggtacatgtgcacaaagtgcaggtttgttacatatgtatacatgtgccatgttggtgtgctgcacccagaagactggttaatttcaataacctaaaaatccacaaggtgggagcgtttcactgaagacagttgttagagaaacgttagaaccaacttcctttttttctctgtcccttcttctctgctttcttcttttctcctcctcctcctcctccctttactctccttcttctctctctgtttttctaatcatgaaaacaaacgaaaaaaactatgagcaagagcacagaaaaaagactagcgaagactgcagttattgaaagtatcagatacagaaaataaaataactatatttagtatgtttaaagtaaaacaaaaaattaaaaatatcataatggaacaggaaactctagagaatggccaagaagattaaaagaaaacaaatagaatgtccatagagaataacataattgaaatttaaacccaaatgaatggttttaacagaatattagtatgttagaagcagttgaagagtgaactagtaaactgtaatataggtcagaaggggctatccaaaatgaacacaggaataaggaaatggaaaataagaaacatgtagttaggagacatggaagacagagggggaaatgctaaaaagttttaaagagtgtttcagaaggagagaaaggagatcatgaatcagtgtatatattttttaaattttattttatgttctgggatacacgtgcagaaagtataggttgatacataggtaaatgtgtgccatggtggtttgctgcacccatcaacccatcacctaggtatgaggccctgcatgcattagctatttgtcctgatggtctcctaccccctgtccccctgagaggccctggtgtgtgttgttcccctccatgtaccca

SEQ ID NO: 45345 - DNA, 8910 bp, Homo sapien
cgctgagaggccctggtatgtgttgttcccctccatgtatccatgtgtttgctctcattgttcaactccctcttacgactgagaacatgtggtgtttggttttctgttcctgtgttagtttgctgagggtgatggcttccagcttcatccatgtccctgcaaagaacatgatctcatttattttaacggctgcatagtattccatggtgaatatatatcacattttctttatccaatatatcattgatgggcatttgggttgattccatgtattttctatcgtaaatagtgctgcaataatcatatgtgtgcatgtatatgtatgtgtgtgtgtatatatatgtagttataatatgtatatatatgtgtatatatatgtgtgtatatatatacacatatatatacatttacatatataatatctgtatatatgtatatatatgtgtatatatatgtatgtatatgtatatatatatatttttttgagatggagttttgctcttgttgcccaggctggagtgcaatggtatgatcttggctcactttgacctctgcctcctgggttccagcgattctcctgcctcagcctccaaagtagctggtattacaggtgtgcaccactatacctggctaatttttttatttttagtagagatggagtttccccatgttggctaggctggtctcaaactcctgtcctcaggtgatccacccgccttggcctcccaaagtgctgggattacaggtgtgagccactgcacccagccctgtgcatgtatctttataatagaatgatttatattcctttgggcatatatccagtaaagggattgctggggcaaatggcatttctggttctagatctttgaggaattttcacactgccttccacagtgaatgaactaatttacattcccacaaacagtgtaaaaacattcctatttctccacagccttaccagcaactgttgtttctggagtttttgataatcaccattaagactggtttgagatagtatctcattgtggttttgagttgcatttctctaatgatcagtgatttgagctttttttcatatgtttgttggccacatccatgtcttcttttgagaattgtctgttcatgtcctttggccaatttttgatgttttttttttttcttgtaaatttaagttctccataggagcaggtgctctaattgcttggaggtctgcctatgtgtggagatgagagggcctcactgcactataatctcagcacaggaaggttggggaagctcaggctgctgatccagtcaagtgggtactccacatacctggaaatctgcctggccatagactggagagggccccactgcaccacaacctatgtttataaacggtggggtagctcaggatgctggtccaggtagacaggtgctccaatgcctgaatttctgcctgggggtgaagcagagaaagccctgctgtatcacattctcaggggaacaggctggggcacccagcaatgacacctgcagactggttgtaggtctccaagctggccctggctgcaagtttcatcacctgggagaaattacagctgtagcagcttttctgttgccccgaggctgcgatgggggaaagcacaattccagcacatactgctgaggtgttttccacaatatggctgtgaaggtccctaccaagccccaaagcagttgttccaatctttggcctgagactaaaatgcctgtgcaggcattctgctgggtcacaaaaagaaaaaaaaaagctgactttgcatgcatccagattgaaaatggcatcttgctcttacttcctggtctgggaaaatgtctgcagctgttcccagtgtctttgcttcacagcatctccaagcctctccccatgttgactccaggccttgggagaaacaaaatgcaacaacttggctggggttgctcagattcacagtgaaaatgtcagttacagagggaggctctctgcctctctcacatactaggacttcgctcacttttataagctggttgctgtcatgttgactgtttgctcacattctccttcttgggatctatgatgtccttcatgattctggtggattcccattttccttcttgacttagagctcacagagttgacctttgtgcactctcttgctatttctaagtggccgaggcatactaaaagcctctaatttatcatctttggaaaaaaacaaaacagggaagtttgcttttgcaaattgttgtttgtgggggtctgtcctgcagaccccagctgcacgagggatgaataatgtactcagacaccaattattcagtgaaagagccgctagggggctgggccgtgcacagaaagagttctggcagccacgagccctgactagctagccctgccagcatttattgaaaaaacattaaatgacaggggcttttagtcaacacaaatagagggtaattaacctggtcaccctcccccgagagagagccatcctgcctgtgaatgatcaaaggttggcttcaggaccacatgagtaaacaagttatttagataaactcccttacattcctttgcacctactttaagctatttactcaaggaaggattaggccgccttcattcagatctattactgaagctatacaacacccccagccttccatgaaggtttgtgtcgatttcttataactatctttaaaatttttcccaccagcctgactgaactcccacagttgttgctactttttgaaattgaaatacttctaggaagactgattaagaacaatatagagaaaagacatatttttcaaactcctgatgaagaagaaacatccgtattaatatatagctaataaaaagataagagatgttgtggaaaacttcatacaagggtgcccactctcagaacttctattcaacatagtactggatgtcctagccagagcaattaggcaaaagaaagaaataaaaggcatgaaaattggaaaggaagaagttaaattgtttctgtttgcagttgacatgatcttatatatagaaaacaccaataactctgccaaaaaatttagaattcataaatgaatttagtaaagttgcaggatacaatgtgaacatacaaaattcagtagcatttctacacatcaacaacaaactatacaaaaaaagaaatcaagaaaacaatcctatttataatagcaacaaaaaatacttagatgtaaatttaaacaaagaggtgaatgatctttacactgaaaactacaaaacattgatgaaaacaattgaagaagccacaaataaatggaaagatatatcatgttcatggattggaaaaagtaatatgtttgaaatgtccatactatccaaagtgatgtacatattgaatgcaatctctatcaaaattcctatgacattttcccacagaaatagaaaaacaactctcaaatctgtatggaatcacaaaaaactctgaaaagccaaaataatcttgatcgaaaaaagcaaggcaggagatatcacattacctgacttcaaattatactacatagctatagcaatcgaaacaccatggtactggcataaacgcagacacatagaccaattacacagaataaagagcccataaataaatctacatattatagtcaattgactttcaacaaaggtgccaggaacacacatggggaaagaacagtctcttcaaaaaatggtgttgagaaaactgaatgtccacaagattgatcttaggcccttatttcataccatataaaaatataaattcaaaataagttagacttaaatgtaagacctagcactatagaactcctggaagaaaacaggggaataactccaagacattggtctgggcaataatattttatgatatgactctaaagcacaggcaagaaaagcaacaaaacacaaatggaatagcatcaacctaaaaagcttctgcacagcaaaagaaagtcaacagagtgaagtgataacctacaaaatgggagaaattatctgcaaactatacatttgataagaggctaatgtccaaaatatcttaggaactcaaacaacacaataataagaaaacaaggaaccctaatgaaaaattgacaaaggatctaaatagacatttctcaaaagaagacatacaaatggccaacagatatataaaaatgctaattatcactgatcatcagagaaatgcatattaaaactacaataaaatgccatttcacatccgttagaatggctgttacagaaaaggcagaagataccaagtgttggagaggatgtggagaaaaggaaaaccttgtaattgttgagaatgtaaactatttcagccattgtaaaagacagtataaatgattctgtaaaaatagaattaccatatgattcagtaatgctatttctgggcatatattaaaaagatatcaaatcagtgtgtcagtgagttatctgtactcccatatttattgtagcattattcacaacagccaagatgtggaattaacttaagtatccatcgacacatgagtggatgaagaaaatgtggtacacatacacaatagaatagtatacaaccttaaaaaataaaaaaagtatcatttgtgacaacatgaatgaaccgggaggacattatactgagtaaaataatccaggcacagaaagccagatactgcataatctcacttgtatgtggaggtctaagaaggctgaacacatagaagtacagagtagaatgatggttaccaggaggattgggtagatgttggtcaaagggtacaaaattgcattgtacaggaggaatgaattcaacagatctattgtgcaatatggtgactatagtggataacaatgtattgtttttaaatttaatttttgtgggtacatagcaggtgtatacatttatggggtacatgaaatattttggtacaggcatgcaatgtacaataagtacataatggaaaattggatattcatcccctcaagcatttattatttgtgttataaacaatccaattatactctttcagttatttttaaatgtataattgaattttagactgcaatccccctgttgtgctatcaaatactaggtcttattaaatctttctttttttgtacccattaaccatcccccacctctcccaacccccactacccttcacagcctctggtatacttccttctactctctatctccatgagttcagttgtttgctttttggattccacatataagtgataacacatagtatttgtctttttgtgcctggcttatttcacttaacataatgacctccagtttcatctatgttgttgcaaatgacagggtctcattcctttttatggctgaataatacttcattgtatataagtaccacattttctttattcattcatctgttgatggacacttaggttgactccataacttcgctattgtaaatagtgctgcaacaaatacgggagtgcagatatctcttcgatatactgatttcttttttggggggtatatatgcagcagtgggattgctggaccacatggtagctctatttttacttttttgaggagccttcaaactgttctccataggggatgtacttgtattcttcaaaattgctaagagtagatttttaagtgttctcataaaaaaagataagcatgtaaggtaatgcatatgttagcttaacatggctattttacaatgaatatatatttcaaaacatataattttatttatctgataaaataaatataaaatatgaaactttatattaataaatttgacaatcataaggaatggtcaagttcctatgaaaaatacctacttttatgaaatgatcagaaaaaaactagaaaaactgagtagtttttttttcattgtagaaattttatttagaaaatttttttttcctgtagaaagaactccagggctaggtggatgcaatatttaataaagaaatattaccaaatatttaataaagaaataatgccaatgttacatgaatatttttagagaattgggaagacataacactttccaacttgttttatatggtggtacctccatgatagtaaaaccatacaaggatattaaaagaaatgaaattacagactaatatactacataataattctaaacaaaaatgtttgcaaatataatccaacaatatactccaaagaaaaatacatcatgactaagtgcagtaatttcaagaatgtatggtttaaaattagaaaaccaaacaatgaaattaaccacattaactgaataaaagaaaaaaatatggttatttcaatagctgtgggaaaagcacttgttcacatttgaaactatttgtaataataacaaactaggaatagaagagaactgatgtaaatatcttaatatatacacaaaaactactctcaacattataaataatcatgacatattaaacagtttcattctaacatgaggaacaaggtacacatgtccagctcaacactttattcatcattaaaataatactgtgcagtaaaattaacaaggaaaattttaaaaagaacacaaaagaaaactacaaatccttatccctgatcaacacagatgtaaaaatactcaacaaaattctagcaaactgaagctaacaacacatcaaaaagataattcatcatgatcaagtgggctttattccaggggtgcttgaatggttcaaaatagacaaatcaataaacatgattcaccacataaatggaactgagaacaaaaaccctatgatcatctcattagatgcagaataagcatttgataaaatccaacatctgtttatgataaaaaccctcaacaatataggtatagatggagtatacctcaaaaaatgagtcatctatgacaaagccacagccaacatcatcctggatgggcaaaagttagaagtgttgcttctagaaactggaaaaaagcaaggatgttcaccttcatcattcctattcaatacagtactggaagtgctagccagaactatcagaaaggagaaagaaataaaaggtatacaaattagaaaagaagtcaaatgatctctgctcactgatgacatgactgtaggcctagaaaaccctaaagtcttcagaagactcctagacttgatacacgacttcagtaaagtcttgggataaacaagccacaaaaatcagttgtatttctatacaccaaatacattcaagctgtttgaatgtttgttgagattaatttgttgagaaccaaattaagaactcaactgaatttacaatagccatgaaaaatacctaggaatgcataactatataaatgaaagatctctacaaggagaactacaaaatactaatgaaagaaattatagatgacataaacaaatggaaaaacatcccatgctcatggattagaaaaatcaatagctaaagtgaccatatcacccatacaatctatagagttaatgcaattcccatcaaattaccaacgttatttctcacaaaattaaaaaaaaatcctaaagttcacatggagccaaaaaaagatccctaatagccaaagcacttctaagcaaaaaacaaagcaaaacaaaacaaagcccccagagcaaaagacaaatatggttcctacaaatgaagaccaatggtaatgcttatctgttcgtggtagaagtgtaaattggtaggattgttaaaaaaaatagtgtagcatttcatggtaatgttgaataactcaataattttacttttaaatatataccccagaggatatcttgcacatatgaaccaggtgatttacaaaagaatgttcatagcagcattgtttgtaatggttaaaaactggaaaaatttcaagtgttcatcaacaatagatctgaggaatgaagtccgacatattcatgtagtggaatatcatatagcaatacgaatggatgaattacaccaacattcaacaaggttgtaatatgcaaacttattattgaatcaaggtgaaagtaccttctgataaaggtgaaagaacttctacaaaataatttcatttatataagtttcaaagaaccaaactaaataatgcatcacttgagaaccattaaagtctattaaaaaacacatacaatgcaatggaaggacagtggtcatatccagcaggaaataaaggagaacacaattggcaaggagcacccaatgggagtctaaggcactagtaaagttctattttgtttccaatcctccaagacatctagtttttttatttttctgagacatggtggcccaggctggagtacgatagtgtgatcttggctcactgcaacctgtgtcctgggcttaagtgatcctcccacctcggcctcccaaagtactgggattacaggtgtgagccaccatggccggcaaatgttctatttcatatcctgtatggtggacacatagatgttctcttttttattattccttgaacactaagtatatgtttatttatattctctgtggaatacctccttatttctcagtcaattcaggatacctccttacccccatcccctttttacttttcgtcatgtcatatagtttctgaaatatagaaaagcttacatattatcctgtcatcaaagcggcatggaggcatttggtagaataaatattatttgttgattattcatcctttcctttcactttacagagtcaatcaaacaccaggtcatgttaattttactgtcacgcacatatcttgaatttgcctccttatctctatttccactattcagttcagaccttgataatcactcatctgcattgtagttgcatttttctaattattctgtttctagtcttgttctaaaatcttttttcctcccacaatgcagctagagtggtcaatttaaagcatcatctatctcaagaacaaaaaaccaaacac

SEQ ID NO: 45346 - DNA, 5420 bp, Homo sapien
cccagcctggtttctggtttcctatagtcactcagtgttgagctaaaccatatttttggagcaatgacttgacaatgcagtatcatgatggaactatcacagatggacagaatgagtctcttgattcctacatttatttttctattgatatagctgatttaaaaagaaacctgttaattatataatcatgtaattaccctgacataacatcaaactccataaattactttccatctctgcctctctctctttctatatatataacatatacatgttacaaaaatgcacagggaataaatatgagcaaaatggtaagaagtgcaggtcctaggtcagatttcttgcatttagttgcaggctacaccaactttagagaaaagatttagtgaaaaataaaaatgaatcattaatacaccacttggcacagataagttattcagtaaacattaacatatgtgcatttatgtttaaccatgggtttaagtgattatccagaaatctccctctctttgactatgtttgaatattagatacttcttaatttatctttgctctgaatttgttttttttcactcgttgtatactcatggaccattttatgtgtttcaggaattgatattttatttaaaaactgttactatagaaaattaacttttggatagtcctgttcagactaaaactatcatttgtaagatctgtattactgcaatcattggtgttaatactttgcattaattaaaattttttatggacatataataagtatttctcccaccttgatttttgtggctatcattttattcattccattgcttttttctcccagtttgctatgaggaagttgataagtacgtaggcaaaacgatagattgttttggcagcttcagtgtatttaagtgcctgtgatgaggctatggtttatttttctaatgtagaattcataatgtagaataaattttaaaaacataaattttattcctgcacattgtgcacatgtaccctagaacttaaagtatgataaaaatatacatatataacaaattaaaaacataaatttctttgcacagctttttctttctgctatttttattcaatgattatttgcttcccttgttatttaagagctgacttttggcttcatggccaaaaataaaattcttagtaggagaaagtaaatgtgatttactgatgaagatgccacccccaagtgacccattaaccactttccctgcgttaccctgggacaaccaaagtgattccaggagacaattcccatgacaagtgatttctggctggcaatgccaggtctctgaagttccacttggccactgcccaagaacaattagtgccgttagttaactacctttactatgacagcattttgtgtaactctttgcacaggggagttttatgcaacagacagaaactttctgagttgttctgattgcctgaagatgccctgttttagaggagcaaaattttccctgtttactgtgtttcagtgttaaaaatatgaatgcattgtcaggattagctctggcaatggtagttaaatgcagatatccagacaaaggaggttatagattggagactttgtgctacttgataatgaagccttggttttgattttatttatttttaagttgaaaaacaaaacacacacacacaatacaaaacatggcacaaaacaaacttatagtttgatttttgtaaacatccctgtaatcatcacataagtcaagatataggactttgccagccctgaagcatgtgactctcctcaactgcagccacctttctcctgaaaagtgacgataaacatgactgttccagtagaggcgtccttgcattttcacggctgtgtccttcatgcatgcattccaagacactatgatttagtcttgcccatttgttttcatttgtcgtgtttttaaaatcccttctaacatacaggtttcttttcaaagttttctttcccatacaatatatttgttgaaaaatttgggatttttgtcacttggtgtccacactgtgaattttgctggtgagactctcagtgaagatcgacattttcactatcctttgcgttttatccaaatgacagttgaatccagaggtttgactaggacacgtgcttgattctatttttggtaagattgtaggtgatggtgtgttcattcaccaggaggtttaattatggcttttatcttagcacctactactactttctactaacacctgttaatacaaagaaagttaatattttctactagcacctgttaatcctcaatatgtacatgtaggatatgtatagacacacgtgtgtctatgcatataatatataataagtacatattatatattttttaagagaaggaaagagcatgtgagagagcacattgcttatttatgttgataatactgattctaatgtaactcagtgggctgcttctttccttgtcttattccatatctgtatctctgtcctttcacagtgagaatctggggttctagcaatacaaatatattaatatttactcattggcttaatcttacaatgcacatacatttgtttcagaattgttatatttatactaatataaaaagaaaaaatcctatcatgaagatttaataattttttgcagatattttattttttcaagcaatagtatgtagtcaaagtatgttcaaaagtcaatttgaaataagagaacagtcaaaaattaatcagattaattattattttccccttaagtttgattatgtcattcattcatttgaaatatatttggattcacttgtttctcattgcattcggttttagagtcttgtaataacttatctttgcttgcttaatatcacactttgagagtgtaaaagattaacttaattaaaaatgtacaattatgcacaaaagcattcacagagcaatatcccattctcccatatttctttcaccaaatttccctctaattctttatagataatacatgttttcagattctggtacattttggctacatttgtttgtttcatgcttgtatttttggtgtattatctaagaatgcattgccaatccacagcaatgttttatttccatgttttcttctaagcatgtatggttttcactcgtatatttacattattgatccaatctagattttgtatataatgtgaggtaggggtccagcttcattttttttgcatatgaatattcagtattcccagcactttttgttgaaaaagctattattccccactgaataatgttggctcccttgtaaaaaaaagtcagctgaatagagatgttttgcttagtctatgtaaaagtatattaattttattgatattttaaaagaaccaacttttagttttgttgatctctgtataattttttaattctcaatttcatttatctctgctctaatgtttatttccttccttctgctagctctggattttgtttgctcttccttttatggtttattgagtaaagtttggttattgatttgacatgtttcttttttaaaatgtaggtgttacaactctgagcactgcttttgatatatcacacccatcttgttatatctttgttttcaatcgtctctaaacattttctaatttccctcatgatttgttctttgattcattggttggtaaatactgtgttgtttaatttccaaatatttgtaaattttctagtttttcttttgttattgatatcttatttcattccattgtggtcagtgaagatactttgcatgatttcaatctttttaagtttattgagcttatcttatggcctaacatatcatctgtgctggagaatgttccatgttcacttgagaagaatgtgtattctgcagtttttgagagaagtgttatctatagttattgcttatagttttattcaaatcctctaattcctcccttgatatttgctctggatgttttgtcctttattaaagttgggttttaaaatgcccaacaattttcgtggaattgtctgtctctccctttaattctctcaatggttacattatatattttggagccctgttagttggtgtacatatatttataattgttatatcttcttgtttaattttgaaatcaatatatactgttctttgtattttgtaacagtttttgacttaaagtctattttgtctgatataagtatatttgcctcagatctcctttggttattacttacatggaatattttctcccatcctttcatttcaactcattgtgtattttgatctaaagtgagtatcttgtggacaatatagttggatcattttttaaaaatccattctgtcaatctctttctttggattggagagtttaattcatttgtatttaatgtaattactgataaagaggggcttactcctaccattttgcttttgttttctgtatgtcttatacctcctttgttcctaatttcctcaattatcgccttcttttgtgtttagttgctattttgtagcatatcactgtgtttaccctctgctttccttttctgtattttcaaaagatattaacttagtggttaccatggggatttacaattaacattcttaatttggaacaatttagaataaattgaaacaacttcaatagtatacaaaatctctattattatttagtttcctatgaatttctttatgttggtaatttcacaaaccacatctttatacatcatgcttcattaacatagatttatagtcattattttacacatttgttttaaaacatatagaatatttaaaaagacttacaaaaaatatgataattgcttttatatttacctatgtagttatccttactggagttatttctttatgtggttttgagttactttctagtgttttttagtttgtatctgaaggagtctttttttttaaaagtgtatcttgaagtacagcctaccaaacatgaacttttaaagcttgcttgcttttctttctttcttttctttctttttctttctttctttctttctttctttctttctttctttctttctttctttctttctttctttccttttctttctttctttctttctttctttttctttctctccctttctttctctctcttctttctttctttctctttctctctctcttttttttttaatctgggaatgtgtaatttatccttaatacttgaaggggcatcttccaagttacagaatttttggttgacagtgtttttttctttcagaactttaaaatgtcattctaagctcttctggcacccatggtttataatgagctctctgctgtcaaacttactgaggatcctttgtaaatgatgcattgcctttttcctaagctcttctggcatccatggattataatgcactatctgctgtcaaacttattgaggatcctttgtaaatgacg

SEQ ID NO: 45347 - DNA, 3960 bp, Homo sapien
cgtagtgtgtcttggtgtgaatatctttgtatatttccttgatgaagtgcactgagctttttgaatgtatatatttgtttttagtgaaatttgggaagctttcaaacacatttcttcaaatagtcttcctgcccctcactccccaccaggattctgtatgtaggcattcttgatgttgttacacaggtctttaggctctattcttttttgttgtcattctttcattttcctgctcttcagactgaatcatttcacttgatctatcaagttcactgattcttttttccagctgctcaaatcttctattggaaccctaagtaaaaagtaactttttaattagttattgtacttttcagcctcagaatttttttgtaccttttaaaaaattcatatttcttatttatttatatgtcattctcttgggtttctttagctctttaagtttatttaagacagttatataaagtttttgtctaatatttccaatatctgcttactcagggagagtctcatttatttcttctgtaaatgggccatagttttgtgtttatttgcatgcttcttaatttttgttgaaaactggacattttggatattataatgtgtttattctggaaaccaaatttttcccttcttcaaggttatttttgttacccactgtgggatgtagtttttatttgtttagtaacttttgtaaactggttttgtaatatctgcattcttttttatgtttgatgtttgaaggcggctcggttcctttagcttgtgttcatttagcatttagtgatttaaaaatgatttccttgactgcaaggagccaaaaaagaaaaaaatatgaaaaacatctcccagactttgcttactgactctgtattggggctccctcaacacttagtggagccatatataattctgccttagccttcattttttcttgctgtgagcctaggaattactaaaggtgagttattagtgtcttctcaggccttttctgagcatgtgtcccaccttggccatgcttatggatttccaaatttttcattgtatgtaagcacttttgagtattcgaatttcccaaaggaactttctctcctgctttttcctcaagttttcagtacagtatatcttgcctcaattgtaatattttgcctcaaatggctgagggttgttaatttgcctttggatgatctgatttctaaaggtttggtggaattctctgtgaaaacatctaaacctagtgtttgtgtgtgtgttataattccatgacaactgtatttctctatggaaattgctcacataagtgctgtacttcttttttttttttttttttgaagtcaattgtggtgaattgtatttttctggaaaattacccattccctctagctttcaatgtttttcatagatgtgaacaacattgtttttaatgattttttatttgctgattatcaatagttatttctctcaccattccttattcatttttgtgctttctctttttttattcatgattaaaagatctaattttttgtcaactttgttgatttgtttaaagaacaagatttttggtttactgatttgatctgttttttggcttcttattttattaattttcacttttttctactatgggttctttcttgtactttctgcttactcttttagatactttttacatttttcagctgataatttaattcctacacttttattaataaatgtgttaaggctatagattttcctctgatcactgctttaactatatcccatatacagatgctccttgatgtatgatgaagttatgtcccaacaaacccccgtaaactgaaaatatcataagttaaaaatgcatttagcacaccaaaaattataggttagcctagcttactttgaacatgctcagaacattttgattagacttcattggtcaaaataatctaacaaaatgtctaaataaagtattgaataactgatatttattaaatatggtactgaaaataagaaacagaatggttgtatgggtactcatcattaatgtacatagctgaaattacacagggcctgaagaatttttgaagcattgagctaaagttaattgctgaatgatgggactaatactttgacacagtcagtgtctgtctcttccgatgatgagggttgagaatagctggtagaaagtattgatgcttgttgatggtaggcaggaattatgttcttcaggaagatatcaataatattgatatcaggaagatatcaataatgtcacagattatgcttcatacttgtcttcctgagtcttctttatcccgaacaccctgagttttcgaatggttgacatgccagctggctttctgcagatgtacttctcgtgcgtaaatttccttctctgtgaggtattcatattgaacatgacctccaagtgtgtttgggtctgtgcagaagacaataggactgcgatttctgatgattaaaacctggattgtatgttactgtgatcagaccctgagactgcgttagcaagttttatagcatctgagtcgctctgttggaggaaagtgcatgtgatgggcatttgcttgcttccccaccagattctctaccttcacccttcctgcaatattccctaggaagctgacctctgctgaatgcaacactcaggttctctgcttcctagattctagttgagtttggtccatgggaggccttggcagaaattttgagagtaagagcaaataattacttaaccattagaaaaaaataacatgaatgtgtccttctatccatggcctcagttcctgttggggagcctcggtgccaatccctcggtgcatcaccatttctaattagttcctgttttagtctgcttttgcgtgtgtgtgtgtgtgtgtgtgtgtgtgtgtgtgtgtgtgtgtgtgttgttataaaggaataccagaggctgaataattttaaagaagagaggtttatttggttcacagttctgaaggtgtgcaagaagcatggtgccaccatttgcttctggtgagggctttagtctgtttccactcatggcagaaggggaagggaagctggcatgtgcagagatcacgtggcaagagagaggggtttgtaccaggctcttgttaacaaccagctcttgtgggaattaagagagctagaactaggtaggcacggtggcttacacctgtaatcccagcactttgggaggccgaggcaggtggatcacctgaggtcaggagtttgagaccagcctggccaacatggtgaaaccccgtctctactaaaaataccaaaaattagctgggcatagtggtgggtacctgtaatcctagctactctggaggctgacacaggagaatgggttgaacccgtgaggtggatgttgcagtgagccaagatcgcaccactacattccaacctgggcagcaagagtgaaactacatctcaaaaagaaaaaaagagcgagcaagaactcacttggatggcaccaagacattcgtgagaggtccacactcaggaccaaaacacctcccattaggccccacctccaacaatggggatcacatttcaacatgagtttggagtggtcaaatatccaaaccctagcagttcccttaaccctggaaagagacccttcattaaactctttctgcttaatcctttgagagtgcaacaatttcctgctaggaccctgacggatagagggaccatacagatcactaaaatgctgaggaatttttcaaatgaactgcacccaacagacctccctgattctgaatatatcaaacttttattttttattttattttattttattttttgagacggaatctcgccctgtcacccaggctggagtgcagtggtgcgatctcggctccctgcaacctccacctcctgggttcaagcgattctcctgccttagcctcccgagtagctgggactacaggcatccaccagcaggcc

SEQ ID NO: 45348 - DNA, 3618 bp, Homo sapien
cgcagggagttattcaaattggttgtcagccagttatttcaggttgttgagatcatctggctcttgattttattaatcatcttagccttccctttcaacaatttgccgactttgtgcaaattttattaatatgtgatctctgtctttatccatggagaggcagtatagtatcatgaggaaaaatagactttggagtaggcagaaattaggtttgaattactagccacgaggctttgggaacattacttaaactctataagcttcaatttctttatctataaggtatagataccttacctttatctataccttatagatacctttatctataaggtatagatctttatctataaaacctgaaagttttggcatgagtttagtaaaactgtctgtgaagcccttgtggactgcttggtccatgtaggcatttgataaatggtggctttatatagagtagggaaatgcaagctatctcaaaaagaaatcagggaaataagaatgccatctgaaatctgtcatatgagaatgaaaggagcatagacaggttttgagtgtggggtgaggagtaggggaggggaggagataagtgaactgcccctcagacttccagggaggagaaaaatgatgtcactgggaactgcagtcatttgaaaagatagcaatcaagcatttctttcagagccctgttcatctttcagtggctttgcttctccagatgcttttgctccttcaattatctctgccttctcccacctcctctccaaccatctcttcccttccttaattcacaatttttctccctcttttcaaggcatagtgctttgatttataaattagttctatgtttctgttttctaatttattagtttctgctttcttatttatttattttgagatggagtgtcactctgttgccccagttggagtgcagtggcatgatcttggctcactgcaacctctgcctctcaggttcaagagattctcctgcctcagcctcccaagtagctggaattacaggagtgcgcaaccaagcctggctagtttttgtatttgtaggagagacaagatttcaccatgttggccaggctggtctggaactcctgacctcaggtgatctgcctgcctcagcctcccaaagtgctgggattacagatgtgagtcaccgtgcctagcctgctttcatatttattaacacattatttccactttcctaaggatagttgttgttcaacctttactagcttttttgttgttcatacttaatacatttatttttattgtgctatagctatttcccacatgtgatttttttttttttttttgagataggatcttgctctgttgctgaggctggagtgcagtgatatgatcatggcttgctgaagccctgaactcctgaggttgggtgattctcccaccttagcctctcaagtagatgggattacaagaagtaccactatacctggctatttaaaatttttttttggcgtgtgtggagatggagtctccctatgttgtccaggctggttgcgaactcctggtctcaagtgatcctgccaccttggcatctcaaaatgctgggattacacatgtgtaatatttttattgtcactattttccacatattctggaaattttatttggatttcttttttttttttttttgacagagtcttgctgtgtcacctaggctggagtgcagtggtgcaatctcagctcactgcaacctccaccttctgggttcaaggaattctcctgcctcagcctcctaagtagctgggattacaggcatgcgccaccaggcccagctaatttttgtatttttagtagagacagggtgtcgccatgttgacgaggctggtcttgaactcctgacctcaagtgacctgcccaccttggcctcccaaagtactggaattacaggcatgagccactgtacccggcctggatttctttttgacatagaattatttaagagaaagcttttaaattttcatgctgtaatttctagttttgttgtgtcataatcagagaatataatctgtagcatttctacattctctactttgcttagatgtttttagggtggggtgtgtaatatgtactgaattttgtaaacattttatggacatacaaatttcaatgtttactttttcaggctataggctttgctacataatctttgtgtattttttggtcctcatatagattttttaattacctttttgctgtgatagagattagaagggtaaattaatgtctcatttaccatcatttttctttctgtatctcttttcatttcctgatgctttggctttatgaaatctttatgtataaaaattgtgcacacatatctttatgcacagtgttttggattttacccttcataatgagcttttttctctcctttgaatttgacctggcctggtgttaacagcccaggtgtaaaattccagtgagaaagaagtctgatgaggagtcagtaggatctttgtgttgctgagaactgctcagtaacacggacagctccctgcactccaggaaacatcctgattcagtgtcttgagtattgtgaaacacagttagagcagaaacatggagaatcaccttaaaatggcaaattggcttctggtcttgcataagacttcattgaggcctaatgggctatgcaggtctactgtccaaagtacagaggttattcctagtgtctttaatattactgtccctttaggcaagagtatccttatgataagggagactgaattaagctattttggctgaggtatatttttataaattcatccaattagcttcccttgttgtagttttggctcaccaaacattgttctgattataatttagcatcccatataatttcatctgcagggagagtctgtactaggcatggcgatgcttacatgtcagcccgtgtgactgcaagagtctcagtataatttgataacatggcactcagattctagacattattctctgtgtgcttagtgagtgtgatgacataaccttcagaaagattcatcctttctcacatattgataaatcaacttttacatctacaaagttgagagccagaaattaaaacctgattaattcactaaggcatccctatgacggcagtcttccaactagctccattctggggcactctgacatcattatacactttccaatgaaagcagggagtgtatgtgattaaagggagagccctgtggcactcctgaaaaatctcccctcccagttcacagtgacttattaaccaacactcatgatcatgtgaaactctagaactggatctgggtgcctggcaggatgacatggtgtgaggctcaagcagcactgtgggaattcaagcatctgtttatttctgagagaaaaagtgtaaagcaaaataatatcttttaacaaatgtttgtatttgactaaaaaggaagcaagcacttaatttatgaatttgctaattgctcttctgagctgagaatatctgtgttgaatattagtcattatccatatttggcacagaataatcccgagggctaaatgacattgttcctacagtgggcacctgaagactggctataaaagcaatcctggccaggggcg

SEQ ID NO: 45349 - DNA, 1166 bp, Homo sapien
ccaatgcactccagcccaggcgacagtgtgagactctgtccaaaaaaaaaaaagaagaaaaaaagagaaaggaaaaaaaaaggaaaaataaataaataagtaaataaataaatacataaaagcaaccctaacactactgaggctattgacagtggcactttgctcttctgttagaaccttgggaaaatgttttccccctgaatacagtataataaacttggttcttatttctctttctctccccctccttttttcttccctccccactaccacatgcacacacacaaatagacagatttgtttatatttgactttctaaaaacctgttactagaaaggcacattaatacatttctcctgtgctgatagtaatcaggcaactctggtttctatcggaggcaatttcttacgtattaaatgccagaaaaagggcatccctccgtttttgtagagagcctttctttatgaagactaatgaccacattagttagtcagtcagtcaataatacttaccaaatgtcagtagagccgaagtgaacaccaacagaaaatcacattttacaaatgcaatttacttggtatcctaacatgccatgtcataataattattgaggcttttcttctctgctgcattggtctaatgaaagtggctagaaaaatatgggtgcccatgtagcctcctggaagcacctgtatgacttttctagaagcgaggttcctggataaagatgaatttttaaaagctggaatgaatgagcagcaatagcagaaggagaaaagtgagtgagggctctccaagaagccatctggcaggctaagggttctgagggaagctctggtttcagaagcaactcaggaattacttctgtcatattaggatgggatggtaggagattgggaactctagggactagaagtcatttaatttcctgtctacaatccttagaagaggttttgagacttgcaacctaggaccttaactaatcatcttccctcagcattgatagaattctttattatacatgttaatatcagattagtcaggatgggctggattatgctgtgttaacagccattctctaaatctctgtggctcaacatggagctctgcctgtcatggtcacttgggacccaggctttgggtataaggctacagcacatggaaaa

SEQ ID NO: 45350 - DNA, 1068 bp, Homo sapien
cgtggctctctctaacttcaaggatggtatgaaattgcaatcctaccatgtttctagaaggagaaccagccctaatcacaatgctacatgtttatagcttgcctcatagagtttactgtattctcctggtataattttcttacatgctcaactggagaggaagctcttaaatagaaaaaaatcacagtaaatttcctttaaaagatctattttacaactctagcatgatggagcacaatggagtccttagtaatggactccatctcttccatcagataaaatgttgagaactgaagttaaaatttgaataatgaaaccaaaggaaaaaaaattaaatgaattttaagacaattgagataagaacaactgtggcatcagcataattcaatttaataatgtattaaatattttgcagaaaagtgaaaacaaattgatagccaaatcaatgcagcattaagccaccatgtggtctaatttcttgctgaattgacaaaacaaaacactagtttagttatataaacatggctgatgtttatacaaacaacagaatttgccggtagcattatcactggaaaataagatgtgtacttaattcttgtatgttctgagcccatctaggaagaacataaaagacgaagaacaaagcaatcacaggatgttatcatgaaaatatcacctttggctggagtaaagttttggctaaatgtggcactagtatttattacagctcacctttttataatgaagggctatggactgaacattcttattatttcccattttcttaccactctatcccaacacacatgcacatgcatgcacacacgcacacacactggcacccacacccatgcatgtgggacacacagagcagcccaggcaatttcaattgttggcagctttgcttttattaggtattagtctaccaacttgctttctctttagagagactaagtgaaaccaaactcatttccacccagttatcctgctggaacctgtaacagttactgtaatgttaaaagcagtaaaacaaaataaaaaccagtcagttcacttactcccgaagtc

SEQ ID NO: 45351 - DNA, 2602 bp, Homo sapien
tctgggcgtcctgtggtggctaccagaggctttggtgagtcattgtcaacccagtagctagagaagtgctggaatgcccctgttaaatacagagccagtttgtccttcagaatggctgcttgaacgaatttactgctcaactcgaaaggccattttttataacccactgcagttgtgcttcatgtgtttctccacctatcctgtaaagtgtattgtgaaattaattttgtagatttcctcacactgcagtgactagggaaatcacccattcattattatctaatgaggagaaagtggaaacatctagaagcactgctcccatcctcctccccagcccacacagacacctacctcaggccctccctgtcccaggtgagcagagggccccaccttcggaggttgcctcccttccaccttcaccaatcctatgaccagattatccccaaggaaatgtcaatctccaggcagcaagggaatcatataaagataagatcattgagagatttttttcctccgtgattggcagtttatattttcttgggtctacaaatctgacagcatttattaaattttctagtttgatactgacctctgtctgatgctgggctgtcaccatgcccaagactgaggggacccacagtctagctagaaggcatggatcaattccaactgccctacccctagcctgtgtgcaggagaaagctctcaggctctggcagaggagtcccaggggaaggatgcatgatcttccactgtgcctcccagccatgctgagcagcaaagcagaccatgagcaggtctcccttaaattcatttgcttgatttgtccttgagtgtccttggatgggtttgttccctccttgtccagtatgtcttggtcatcctgattcctgggcttggctcccaggttgattctttccctgacacaaaacaggcactatgggcaaagacacctgcagccttggagagaccagtgatgctggatgtttcctgttagcactcaggaaagctcagagcttttgatgagcatcttttgatccattagttaaaaccacgctgggttctttatagtggttagttagctctgggctatgggattgtggaagacatttatttcttctttggattcacctggattttctgcaacggacatgtatcgataaaatacatggtgcttttcagaaattgccccatcatcatgttgctgttgttgttattgatattgttgtttctgatggatagagatctaggcctgacactccaagcagtgtgaacagcatttaccttgataagcattcttacatcttaaccctcaggaattttaaatagaagtgttccgtgtgattaaattaacaggtttagagatgggtgtcctggttatttcctttgttctcctcctggtagctgcctgcactcacagcgtgttgggaatggtgattataaatgtaaccatgctctcttcttgtaagtggagagcccaggtacctcttatccagcatgtgaccctctttctacctcaggatagtcatactcttaggcttcctagatttattcagggccaaaggagtggtcaaggtcctttttgttttgccctattccctttggaaaacatttagtttatgcccatgttacagattgcaaaatacaggcacatattctcactaatgtggtctgcatgtccctttgcaaggacatgcaatgtgacttcactactcctttcatcaagaaaaggagcctcttggtcgggcacggtggctcacgcctgtaatcccagcactttgggaggccaaggcaggcagatcacgaggtcaggagatggagaccatcctgcctaacacagtgaaacacagtctctaccaaaaaatacaaaaaaaaaaaaaaattagccaggcgtggtggtaggtgcctgtagtctcagctacttgggagcctgaggcaggggaatggcgtgaacccaggaggcagagcttgcagtgagcctagatcgcgccactgcactccagcctgggcaacagagcaagattctgactcaaaaaaaaaaaaaaaaaaagaaaagaaaaggagcctctttgcctctttaccctaatctgggcaagccttgcaacctgatttgccaaaaaaaatatgaaggaagcaatgtgatgtgattttccaggctagaatgtaagaagccttggagcttctgcatttactgtcttcagatgctgcctgaaaccactgtaagaagctctaacctactggaggataaggggtgagcccaagagcatcaaggctcccatcaacagccagtcctgtgagtgaggccatcttggacctgccagctcagtaaacccttttgctgaacacagcccaaggaaggaacccttgcaaaatgaaatcatgtggtcagtttgcagggtggttattacacagcagtagatgattgaaaaggcccagtgtcttcctggggactgaaacacccacctcctgttcatgttgatacacggtgagcagaatatggatgtgggagtggtgttggttgcaggtgaggtagagaagcactgaacagagcacaaagacctgatgttccagggtcgggagtttagacttgatcctaacagcg

SEQ ID NO: 45352 - DNA, 2385 bp, Homo sapien
cgtggtcagattttcattttagaaagttactctgacatccatgtggagaatgaacttgaaggtcacaaggctgatggagccaggaagaccatttgggaggtgatcgtagtaatctacttaagagttcattacgagctggggaatggggaggtgttagagaagagaaaatggatttgaagagctgagggatgttaaaaaggcaaaactgggccagggatggtggctcacgcctgtaatcccagcactttgggaggccaaggtggacagatcatgaggtcaagagattgagatcatctgggccaatatggtgaaatcccctctctactaaaaatacaaaaattatctggatgtagtggcacacacctataatcccagctacttgggaagctgaggcaggagaatcgcttgaacccaggcagtggaggttgcagtgagctgagattgcaccaccgcacaccagcctggtgacagagcaagactccgtctaaaaaaaaaaaacaacggaaaattgttgggacttgtaattaattgggtgaggaaactgagtggcaaatggtctcagctctacacatggagagccctggggacatagggagagcacatttggaaggaaagatgatgattttagttcttaaaattttgtttgtggaggaggcattcagacagagaattctgttgggcagttttatgtagagaactacatctaaagaggtcagaagtgaacttcaataaaattgaggtgaccaatgatcatcagttttaaagaggacatattttctttttctgttaaagggaacacacctatgagtcagaaagccagacatttattttttctcgccaaaggttattgtacaacctacggaagagagtgtaaacactggtctttaagatgaattgtaaagctctaaagagaataagaaaaattgtgtttcatgatttatgatggataacattttagagttgatttcataagagaattcattaagccaatagacaaccatggcattttaactgtagtgtttaagtatctttagctctgattttttaattagcagaagcaaataaagagagcttcattttaaccatgagaaatctctcttctgtatttcatgtgactaaatttgtccagacgctgaagttcaaataatcacagtgattgccaacataatggttaattttctgagaagtaagttcatgctttgccacagtttgctcccctgtaagatcagacagaaaaataagaataaaaccgactaatagctattgattgcttctggaacagctatcaatataaagagccagacaaaacacataataaagaattgtgttagtgccagagagactttagagatcatttgcccatctctttaccttctcccacttctttctgtccctccaccccaccagctctgatacagacacacaggatattagtaaaggatagtattttttgagagccttttgcatgtcaggcactgcttctaaacgttgtataataccagctcattcaatcttcaaatcaatgctatacagtaggtactcttcttctttttttttttttttttaaattttacagctgagggactgaggtatggagaggttaggtaacttgttcaaggacaccaagccagtcaggctgccactggacctaagacaaggtaacctggctctgagaccaaccccacagagaagtatgtggatgctgacaacactgtaggaagttacaaggagcaaaagaatagcagcctcagccctgaattccactgtaagcttccctctaatcttccctgcctcactctcaatcgaataaagagctgatcaggaagcaactatgcacggtcttcccctccacacctccagccccagctcccttccccagactcagtgccagcctgtgccagcccccaagatggcagtgtggagccatgcactaggtctgccgcgcacccagcagtcggctgtgggttctttgtatctgtcagagtcctggcaggaaatggtttcattctcaaagggttaactaggaagaatttagtgaagggtcagtttacaaggttcaggaactaacggaaaatggtgaagcacccagggactggcactggagcttccccacaggagctgaggccagagaagtatacatccattgttgtcttaaagagtggttaactatctatttgctcttactttcaacatttctgctggggccttgcattgagcaaactcaactgtaatctagagagcagggactcctgagtggcacattcagtgggagtcagcttcctagggaatcatttatttatttattatttatttatcagagtctcactctgtagcccaggctggagtgcagtggtgcgatcttggctcactgcaacctctgcctcc

SEQ ID NO: 45353 - DNA, 2947 bp, Homo sapien
cggtagtcctcctttcagacatcttttttttctctgccccaacaagtggcctttccatagaagactgcccagagaaccctatggcaaccctaccctcttattccactttatttttcttcaaagtgtttattactccctgttgttatgttagactctatatttctgtatttgctgtcctccaacttgaaaagaacctctgagaggggagggactttcctggtcacattcacttgtcccagcacctgcgatggtgcctgacatatctcaggggctccttaaatatttattgctagacaatgggtatcatggctcagcctcctctggggttacgaggctggaggaaagaaactttagcatgagtgcagtgagagtaaaagaattcagcagctctaatcagggaatgaatctggtgtgtaataggatctcaaggcttgactcctagtctaagaccatttctggagtttgctgacttgatccccatccttcatcattagcactttgcagggaaggagctgagcgtggatcttgactctgaattggctgggacatgcaaaatcgggggcatgcttggtgttgcccaggctcagctctgcctagacacacgtgagggccaagatctggtttgtgtttcatgagctctcccaggatgaagacccagccaggctgtctgaagaaggggtgttcttgagtaggagggaagtactgctccaatacgaaaaatctaacaatagcatagtccttaagagcttgagctttgaagagggagaacagacccatttaaggcatgaaaaataaaggaaactcttgagtccctccaaggaaaattccagccacctggctagcctcaagaagtagatgagcaccctgataagtaagaaggtaataatagcttaaaacaatagtcaagaaaattagagccacaaactaatcttaaatgacgagttaatgggtgcagcacaccaacatggtacatgtatacatacgtaacagacctgcacgttgtgcacatgtaccctaaaacttaaagtataattaaaaaaaaaagaaaattagagccacaaaatgtttgtttccctatagaaactagagataacatcttaacatatgtccctgagttgttttgtagaaacccagaccccgctaaatggaaaataccacctgttggctcgtagatctcagataaggaggaactgaggactgaacactcacaactgttctttgttctaaatttcttcctgagggacctggaggaagtcacacccacaggccagagcagaacattcctttctgctgaccccaagtttgtagccaaaacttaaccaatcacaaatcagaaaatctttgggtttttgtttgtttgtttgagacagagtctcactctgctgcccaggctggagtgcagtggcacgatctcagctcactgaaccctctgcctcccacgttcaaacgattctcatgcttcagcctcctgagtagctgggattacaggtgcacaccaccatgcccagataatttttgtatttttagtagagatggtgttttgccatgtttgtctggctggtctcaaactcctggcctcaagttatccacccaccttggcctcccaaagcgctgagattacaggtgtgaaccactgcacctggtctcaaatcagaaaatctttgaattcatctaatggtcacctatcctgtgggccctcactttgagatattttgccttttttggccaaaccaatatgtagcctccatgtattatatgaccttgcctgcaacctctgccttcccacctttaaaaacccttacacataagccatcagggagattaggccttaaggattagctgcctgatactccttgcttgctgcctgcaataaattcctcaacttctgtctcagcaatgccgatatcagtgcttgactttgataggctgggtgggtggacccaaatttggtttggtgaccctttgagcttagattcaaaattctagttttgtcactctgcagttttgtgatcttgagcaagttacttaacctctctgagccttgtttgtcatgtgtaatgaaaagagctatacttaccttgtgaggtagtcctcaggattcaatgagataataagtactcactaaacaaaactcgttattacaaaagaatcactttgtctctgaagtgggcaattcaacccatttctaggagattttaaacatgattttagatatttggtgtgattttgtgaatgggtttatcgttaatagctttcatgctccagaattttcttgaataataggtttttgcaaagtgcattccatggaatactcatttgggtgacgttaatagacatcactcaaaagctgggtgaatattacaatgtttacttcatctgtaacaagctgagtagctacagtacatatctaagagggggctctaattctcaatattttccaaatttattagatcacagacttttcttttagtgaagtgcttaatgaaacttaagttctgtgaaaagtactttgagaaatattgctttaaaaagaaaaagattgagccctgtatcaggggaaatatctaatattatattaaacaaaaaagtcccactgaagaaaatcatcttattgttcatagaccttagtttaggtattggggccaaaggatggatgaccatttcaaacgatccaggctaagccaggaggagagctcaaagtctgatctggtgagtaagttgtgaagggaatgtgatgaaaaagtacacttctattgcaaagaaatcatgagctaggtttatacgctatgctgtgaatggccaatagattataaattcaacagtctccctgtcacagctatggtaatgacgactgtttaggccttaggggagctttagggagaggcaatttcatacttaagtcacactgacttaaaaagtgaaatatttgaaatcattgttgaaatca

SEQ ID NO: 45354 - DNA, 1696 bp, Homo sapien
gatgaggttggaatgcctatcattttcctcaagctcatgtcctctcattttcttatttgaaaatctatttggctcagaaaggacacctagggttagtcaaaaatcacctcctgatgttccttttaaaggaagcttccaagttatttgaatagcttccaagttattcatcgagaaacaaagcaaattcaaagattatgtccgtaagcacaaactggattttaagaaatcctggctgcataaacaattgtcttatagaaaagaatttctgttcctcttttccctccccttgtcaatcctatttgtttcagacctgggttcaaacactagctgtagaggctataagctattggaagcacatttgagcctgaaataaactgaacctcttttgccttggttttctcacttgtaaatggggatttttgtgtctacctcaaaggtacgttgcaaggatcgagggacagagcgtgcagcaagtggccaatgaatagaagtctggttttctgagcatccttgcagctgcaggcttcagtctaccagagaatgtgaggtgttattcttctagggcagtggttagaaaagaaaatgaaagtagcagtactcttttcctaatgcaaccatagatggatgatcagaatttgtaatccataaggtagaagctgctgtgcctgaagaaatagaaagtgggcagaggtggaggggcaaggtagggagtggagtggaaggtagggagagtttgatcctagcctgcactgctcctcagaggtactttagcctctttggaacagtattagaaaatcatggttctatcaactcatgtctgaaaatcaattgctatttcagagcaggaggtgaccaatcttggaaataaggaagggagagaggcagccaagccagcagctcctaggattagtcactgcctggagccagctcttggaagttccccaggagctgtccagtcttatgtcatgtctagtcagcagagtcccaaagaagcttgtcattctctaggcatttgtgcttacattctgatgggcctaatagcagggagatgacatggagcccaggcagaacagctgagatttctactggtcatgacctccatcttctccttcacacctttcctacctttctttttccatgcattcaacagacatttattacccaataagtgccaggtagtaagcgaggacctggggagagcagatgagtaagacaccgtctctgtctctcaggagctctcagattcttagggacacatgtacatcctaataaacacagtgcatctcatgaatgtgtaagtttaagttattgatataggcacacacagacagagggacttcgttccctgcaggttctgtagtatttcgtgcccactcccctttcttcccttgctgctcacatcatcctgccttcaaggaatctggggggatggtagactgaaagtggccctttctgcataattcttcttgaaaataaacatttgctctcttcttagaggctgactatactgagagctaccactccttggctgcttattagccattgggttattgctaagccctttacatatgttatatcatttaattgtattgaatcttcaccataacacttcaatggaaatatttttccaaataaggaaaggtgagactcaaagtagttgtattagtctgcattgctatgaagaactacctgaaac

SEQ ID NO: 45355 - DNA, 1094 bp, Homo sapien
gtggctcatgcctataatcctagcactttgggaggccgaggtgggcagaccacgaggtcgggagttagagaccagcctggccaacatggtgaaaccccgtgtctactacacacacacacacacacacacacacacacacacacacacctgtaatcctagctactcaggaggctgaggcaggaggattgcttgaaccctggaggtggaggttgcattgagccaagatcacaccactgcactccagcctgagtgacagagcgagactccatctcaaaaaaaaaaaaaaaaaaaaaaaaaaaagaaagatgtttaattgactctatgttccacaggccatacaggaagcatggcttgggagcatggctgtactccagcctaggcgacagagtgagactctgtctcaaaaaaaaaaaaaaaaaatccccatatccccattcactgtccttttctctagaaaataccccatttcatataactgtctaaacaacggtttaaggtctacacaagattgtgaagtgaacctgcaggattaggagggtaaggattcccacctaggtgggctcacttgctctgccatacctgggtaggatcccagcctgcttctgtgattgtcaggaggcaccaaaaaggctaccctaggttttctgtcattcggcccaaacatttcctctgctgggcaaatgtggaaaagaggcattaagctggtgctcccacaactgaaaggaaagcaattctctttctgttgtggttccttcctctttggactcttttcttccattccagcctatccccttcttggaaaagctgttctaccaatagcagggaagaaacagcgccgtgtacctgatacgctaccctgggcacaggcgatcagaccagggatagacacctgaactgatctgggcagatgccctcttctggccattgagaattgacagcatcagacatctagaacataatagtatttttaaattctgcagggacatccaccaggctgagggggaccaattttgttttaaaaatgtatcctgaacttggccaggcatggtggctcatgcctgtaatcacagcactttgagaggccaaggtgggcg

SEQ ID NO: 45356 - DNA, 5214 bp, Homo sapien
cgtggtaaaatcctgtgtctattaaaaaatacaaaaattagccaggcgtggtggtgtgtacctgtaatcccagctgctgggaaggctgaggcaggagaattgcttggaccagggaggtggaggttgcagtgaggtgagatcatgccactgcattccagcctggccaacaagagcaaaattccatctcaaaaaaaaaagtatcccaaacttggaagtaaaaataggatgactgcacgtctttctaatgccatactggaaggttgcctaacaaaccaccaaagctttttttaactctctaagggaaggtacttttgtttgacttactatttactattgattagggcccagactctgccaagttacatgttaatttttgtctggtagagatacaaatgatttttgtcctgtaaaaagattttattgctccacaggacattaatgagtgaggtttccaaattagcaaacttatgtcagcatgctgtttctgatggtctatccaaatctttctccttccaattctcttttcaaacagctttaccatcctctggttctttcttttgtgaagtaaacagatctttatacacactccctatagacttatataagaatcatgttttcactttttgaaaatgatgctttgacaattccactgaacaggctggggaaaattttatgagaattgttggatcctgctcagaagcaaaaagataaaaccaggctatcctctatcatggctgatctggggttcattcccagaaatgagggtcttggatcagggtcaaatatgtgggtggggtggactcaattactgagatacccatctcatgaggaaggatgggacccatattatgggaaacaaaacaggaagaatgagagtgaaaagattaatcctttcactaaattgggaaaacaggagaaagtgttgttggataaagaaggaactttagcacaatgagcagagacaagacggtaaatgttccttatccagtaatctctgatgaaaggccagtgctcacatcattagtaatgtccagaaatgataatatcagtagtagcaatactcacaatgtaaataagtagctctcatgttttgattgccaatagtgctagcaaccttacatgtatcactctctaccccagccctgttaattggtactatgatgaagaaagagactcaaagaaaataaatgactcactcgcgtatttttacacagctagaattgctacagaaaggattaaagccaagtctatccaaatccactgtctatgtccctccctccctccctccctccctcccttccttccttccttccttccttgctccttccttccctccctttctgcctccctccctttctgcctccctccctccctatctcaaacatctattgagtgtctaccatgtgccaggcactgtgtcaggctcttgggatacagcaataagccaagtccttgctttcagggagtttacattccagtgagagggtcacagaaacaaatgtatctctatggcagcaagtgctatgaagaaaatcagcttcatttttattgtttcatgcccatcatgcaggtttcccacagtccatcatccccactccaccccccacccaatgtagtgctttcctctgtcctggagaatcggaaagacttcacagcaacatctgcagtccctttgtttcagtgactttggcacagagaagtggacatggtggcagacaaagctgctggaagctgtcaggctactggcagccaaaagcttaatcacacattccaaaggcagtgtgtgtgtgatgttgcatctctggccctggaagggagatagaggtcaccttcttgggagtcagagttggcccctcagctcccaggggttcagctgagcagcttcagagggctgactgcagagaccaggaaggggccattcactctgatgggaattgggaatcattgatgctcgagcaacagctgagttaaaattcatgctaagaaatcagcattcacatgtgtacatatttaagtcaggatctcagtgaagagggcatgacagcagtgaaaagaggtgccagacctgaagtaggctaccttatggttgctgcttcacctgttgctctacacacacacacacacacacacacacgattccagaagatagtgggacagtagcaatttgaaggctctgccagaaaagcatttgcttaaagtgttgggaattttttgttggattgttgtttcattcatagggcttctaaatttcacttttgcattttaaccatttcaaggaattccccctgattttgagtgtgaatgggtacaaaagaccaggggttgttaaccaaaagcctggaacattcaggtgaacggctgttctgcagggaaggagggaaacagcagggtgagatggatggtcaaccttcaaaggccttacacagtcccggccaggataatcttcgcctctcccttctgctggggaaaagtctggattgctaagaccagggtctctatagtggcatctccaacactcaggccgagcttcatggctgggttcctgttttttcatttgctcatgcccctcagtggtatcatctgactcagctcctttccctcctgttgggccagtacttacagtgggtctcctgatgaagctgaggtcatgggttcatgagcccaattatcaccatgctgaccgcaccactaacctggctccgtgtagttgcaaacttggctgcacattggaattcctagggagagttttaaacatcccaacgaccaggctgcaatgaaataagaccgatgaaatcaggatctcaggggtggaatgggactggtaatttacagaatctctccagctgattccatattcagacaagttagagcaccaatgccctcagtcctgagagtgagggctggtctcatgaatccattcacacagatggaagtccatcctcacagcggtcaggcctcacacaacatcgggcatgttggtaggcatatgcctaagtttctgtgcaatgaatgcatgccttactggtgatgcatcaatagcaaggcattcaggggagagagtaccctgcctcagtgcctagcatgagacatacatccaggaccatgtttttattcccatcttatggatgagaaaactgaggttcagaaagggtaggcaaaatcccctagctcacctggctggaagggggcagaacttccctgtacgtgctgagaacaccactgttcgagcagaggggaaacctctgcaaatttcactctgtgttcagtgggtgacttgccaaaatgacttgccaaagccctttagggccaataaattagagtgtttgcatcaaatttccatgcacaagagccaactcaaaaccttagatccaattccattggttcccatagctctgaagtggagagatgctagtaataaatcctacaggctgatggcaggactttgatatataatattaactctgatcttggtggtggtctgactcaagacagagggaatattaaaagcagtagtaatccttctaaaagttccatgcgcttctgcccagatatccagggtttctggctgaattagcctgcagaagcaattgtgcagattaggtgatgttgaaccacgagaaagtgtcttcccacttagcaaatcaagggtccatgggatggagagaaaggagggaatagagtttgtcacttgggctgtactgaccccagtggtgatgtcttccctttgatgggtggtgttgggacagcaaggcagtcatcatttagcccactagtgctaaggcggaaggcatccgcagtgcatggtctggcatccccaggcaaagacaagaggatgggccctgcagagtgttttgggttagaaacaagctgagtgaactgagtgtttcttcagggagcgcactaaagatgagccgacaaatccacgacagtggggagtgaggtgaggcagggacacaaatccacagctgactcacccagcacattcccacctcctcagcatagaaaaccacagggacaaactgaccagaaggctattcatccatgggtctatcccgtgccttgatcagtcttcctaaatcccacctttgccaaagtcactccagtctgtgaattttccatggcttcctgatgcatatggaaagacgttcagactcccaatctgaggtccaatgctctccagaattccatctttccctaccttcctggaatcatttcccattgacttgccatctacctggacaagctggaatggctgctttggctgtcttctgaaaatgccctgaggtgtctctgccccaggcctgtctcctgtgcccccagagctgcccaggcccctgcttcctacagagaccagctcacagtcttcttgtcagtggtcatctaacagtggtcttgtaaaagcagagcaagttccaatcttatttatagcattcagcagttttttttttttttagagctggtgtcttgctctgttgcccaagtttgagtgcaatggctcaatcacagcttcactgcagccttgaactcctgggccctagtgatcctcctctttcagcctcctgagtagctgggaccacaggtatgcaccaccatgcccacctaaacacagtctacctttatgtgtgtgtgtccatccatcaccagatgctcacggaaggtagggcagaaacattttgaaaaataatttttacctttgaagagtaatcttaatgataacctagcaggtgctcagatacatcgggtcgattcacttcctatggctgtgtaacaaattaccacaaacttggtgatttagagcaatgcccatttattatctcagggtttctataggtcagaagtttgggtgttgcatggctggattgtctgtttaggatctcacagggttgagatcggggtagccagggttgcttctcatctggggctccaagtcctctttgcaagctcactggttgtcagtagaattcagttcctgtggttgtaggactgaggtccccatattcttcttgctgtttgtcagtctggggtgctcccagcaactcaaggccactctcaggttgttgacacagggtgccaacatctatcttcaaaaccagtaggaggatttctcttgcactgaatctcttttgcatctctgacattctcagtctctgacctctagatccagatttaaagggttcacttgattctgtcagacccactcaggacaattatttt

SEQ ID NO: 45357 - DNA, 1162 bp, Homo sapien
cgttcttaaaagggtctgggaatgttcacccatcacagacatccacaccaggccagttaagtcagaactgctggagattccacattctcctgggcagcctgggtggagaaccacctatgtggaaggaacactgggctccaaagataaggggccttgcattttatttcattaccagtgtctattggctctgagaccttacagaaatcactcaacttctcagggcctcatttgcaaacacggatgataatagtaagctccatctctcacggttgttaggaggattaaaagtgtataaagatgctctgcaagctctgaagtattagccaaccgtctagtcagtgtgaagagacactgaaaagtgaggtgggacagagcattttaagtgaaaaagaagggagaagcttatctttatcaaagttaaatattagatactgagtactttgtaaagtctgttgctgctggggatcaggcaaattgttataaccttcctggaaggcaatttcccataattatcagcagtttacagaatatccaagccatttgaccctaagataatgtttctagggatttctcttaaggatttaatcaaggacacatacacagattatagcagttcaaaattggaacccatctatttaacaataagggattgtttaattacacatgaaatattatttaaacttgaacattatattgcctttaaatatttgacatggaaagaagcttaaaactcagtcctatttccttatcaatgttctatcaacaaggggcaggaggtgtcacctccttgggaatcagagttggcccctcaggtaggtgtttggagcttcctggtaggggctggggacaaagtgtggatggggcacctgctggacctgtggcaagatcatcagggattgctattggtctcagcaagggagtgaggctgaccagttctcagctgcatttcagagaaggatgaaatgccctaatcagaagtcagctcccctcatgaccctggagggaattctgcccactcacagactctttcttattctgggcctctgctgttatctgggtctagctccctgtcacagtcagtttggggactgatcctccaggaaagtcctgggacctctcggcaggctgaatgcttctcctttgtgactcccctgccatggcg

SEQ ID NO: 45358 - DNA, 1329 bp, Homo sapien
gccatgttgccagccacctgttggggcaaggaagaaacctggaatctccatgtttgggtggactcagtttccagtggcctgcgtttgcatatcaaagcttgccagtggctcttagagctggcgctctcctgttagacaagaaaggtttctggatctgctttaaaagaaacaaaaacttcccaaggacctcttttcctctctatctgcctaaaataatttcttaataactcctataacaataagggggtggtccattcccacatgtaaattgaggcttttcccagaaatagggtgaatagatgctgagttaccccagtcagcaaatgtccatttatctcatttgtgaactctggactctgcacagagattgtggtgacacaggctgtcctgtgaccctgtggctgggtcagctcctgtgtctgcgacaggatgccctgagtccccatggattcctcaaccccacaccctgtcctacttttagccaagtcagccatgcccctctgagggctacgctgcttcaataggcctggcttcctaagtacctttcattatcacccaggctcatacccagaagcaaagcagaaatttcttttgagatccagggtgggaaatggtcagttgaattgagttgcaaccgaaggtgaggaaacgtcttttatgaaaacccatttccctctgtcggaggtgatttcagtcacattttccaagctcaggataatttaccccctaccagggtgcactgcagaaggtctggctggaaggccccgagcacaggagttgattgctagctgctaagaggctgcgctttgttcccgaaggagaaagctgcaggttaagagaacattccccaccttgccaggggtgacaaagcaggggactgcttgagggctgacactggagttagagataatgaaaggagaggaggaagaagaagccagggcctggctcagcatctcaccgcattggtggggagaggagctgctcaccttctcgcacctgttgttgggctgagacagattttcagagagcaatgcctcctggacagaggctcttccccacagggcaaatgtaattagatgagagaaaaacaaagctctgaaaccctaattaggtgccaagccctcaggctttatacatctaaacagctaaggaacagaggataagattctccagtcggcactcccttgccagtcctggctgagctaatggtgaagtgagagctgtgccacagatcccatggttggctttttgttgttgttatttcagatggagtttcactcgccacccaggctggagtgcagtggtgcaatcttggctcaccacaatctc

SEQ ID NO: 45359 - DNA, 2817 bp, Homo sapien
cgccaccatgcctggctaatattttgtgtttttaatagagacggggtttcaccatgttgaccaggctggtcttgaactcctgacctcaggtgacctgcccacctcagcctcccaaagtgctgggattacaggcgtgagccactgcacctggccccgtggttggcttttactccttccattctgccaccctgaagctgatcctctggaatttgcttgtttttggtgtgtccagaaatgaaggtctatcagttcttgaaattgggttgttttaagtaactgatgtgctgggatgacagtgaagaagacaagatagggattcctcttcctaaactttagggcctgaagggactcctcattgacagcagatgggatttttaatttcactctgggatggaggaagtggagaggtgatccaggctggattgaaatctctcaagcctgggagattttgcccaaagacttttgacatgggaacagtagaaacattgggaaaattggactttcaggtcagcattctgggtatttccccagtcttcccagggtgggatcatctggccccagttatgggaataagaccacataaatagaagatgacttgggaagtcatcttcccaaggtgtcagggaggaggtggaggaccactgttctgatcagcctccttcaacctcacagtggggttggtctcagatggtgcccaggaacctgccagcagcggcactttgatggcaccaagatcgtgggtgcagggacccagatttgcttcctactcatgtctccctacccactgaaaaatggaatatcagtgaggaatatcttagagggctgcctttgctccttttgccagagaaccaatattggttattaacaattgggccacatctggtgtgcagaaaaatgaatattttaatagtgcttcatagggtatcgtagcatcttataaaaagtggcccatcaaattattgattcaatcatttaaaatgcattagcagaggatgcctatcagactaagacatccatgtttctgatccagtgaaaagggtccaggtaaggaacacatatgaagcctcttggcatccttgtgtgagcacggtgcatgacgtggccatcagtatcattgttttctttgagtttttgcttgagtgttgagatgtgtgagggatagaagatccttgtttgcttctagtcctgacctacactgtccattagggaaataatttgttttcttgaacccattatatgaataattttgtttttaatcaatagaaacaaatggtctttatttaactaacagaaaaaattccaatgaggccaggccacataggggtttctgtaaatgtcatatcatttctcttctgtcccctcagctaagagtataaaaagttcaggcgacctccaggggcttttgcctacttaaatagtattacttagagatgagctagtacttggttttaaaagtaattttttttttcttttttgagacggagtttcgctctggtcgcccagtctggagtgcaatggcacaatctcggctcgctgcaagctccacctcccgggttcaagagattctcctgcctcagcctcccaagtagctgggattacaggtgcctgccaccatgcctggctaatttttgtatttttagtagagacggggtttcaccatgttgggcaggctggtttcaaactcctgacctcaggtgatccgcctgactgagcctcccaaagtgttgtgattacaggcgttagccactgctcctggccctaaaagtaacagttctaagctttgtacttacgacaccaaaaacatacagactgacatctaagtaattaagtcaatcattaagatatttagttatgtcatgcaaaataataatctccaaggagttctcaaagaattcagtagtttgatgttattgccagcacagcctttactgagtcctcttataaatcttaaagaaaaatttaagatttttaatttttaaagatttaaaaatttttaattaaattttttttttagggctggactcttggtctgtcgtccaggatagagggcagggatgccatcactactcactataacctcaaactcctgggctcaagcaatcctcccacctcagcctccggagtagctgggactacaggcatgccccaccacattcggctaatttttaaaatttttttgtagagacagggtctcactatattgtccaggctgctctcaaaatcctggcctaaagtgatcctcctgcctcagcctcctgagtagctgggttagatcctggcaaatgaaagggccccagctttgaactacctttggggacgatctcactgcacacgggttctcacacagcacaccccgtcacacacatgaactcacactgagaacatatgaacactacacacatgttctcacacagcacacgccccgtcacacccatgaactcacaccgagaacacaacatcacacacagggactcacgcacagaggacatgtgaacactacacacacgttctcacacagcacaccccgtcacacccatgaactcacaccaagaacacaacatcacacacagggactcacgcacagaggacatgtggacactacacacacgttctcacacagcacacgccccgtcacactcatgaactcacaccgagaacacaacatcacacacagggactcacgcacagaggacatgtgaacactacacacacgttctcacacagcacacaccccgtcacacccacacccccacatgcctagacacacacatccttactctgcgtgcatccctggcctggtggacggaagatcgagcg

SEQ ID NO: 45360 - DNA, 1927 bp, Homo sapien
cgtggtcgtgcttgcatactctctggtgaggggtggggagagggggtgggagacgggtagaaatagatgaagtagatgatgggtggattgctggctagatagatgatagatagggataggtggtatatgggtgataggtaacaggtgatggatagatgatagaaatagatgatggatagatacttgataggcaaattagataatagatagcaatagatgaactagatgatagatggaaaggtaggtaggtagatatatgatagatggttgatagataaaaatagatgaaatagatggcatggttagataggtgggtaggtagatagatgacagatagaaagacaatagaccactgggggctgagcctggcctgagccagaaaggtgagaaggggacagcggtgaggaccccacaggtccctgctctcacccctattagccccagtgtttggcctgagctctgactgacagctccctctttccgagatgagactcaagaggaggaagaggggacttcctaaggacagggattcttggtgtctccttgggggtggtagacactgcctgcctcgcctgctgtggcctctctgcacacaaccaacgacccctaaagggctccatgggcgcccatgctgcccccatcagctgacaccccctgtgcgaagattctcctcctcctcttcctcctgcctttctgtcccctcatcctcctctttatggaattaacttcccttggtcaacatcttcctgcttcactcacttccctaaactcctccctatcccttctcaatctgcaagaaaaatgtagaaagaatatggtaaaggaaagctttgagcccatatttgggtccaatgccgacaccacatgccccaaagcccccttgagagcatccacgtccgtgtagttgagtattgcccgagctggagtgagatttgcctctctacggagctgccttcctgcagttcaagagcactgtctcttttctgggcctcctgcctggtgcaagggccccagctgagcctcctccagctctgacctctggtggttccgggctgccccagagggtcttgcccaggctctgacacttggcatggtctgggagctccagcagccacagcccagccctggggaggctttgtggtctctgagggggcaggtgcactcccccaactccagttcatgtttttccctccaactctaagcctttttcttcctctgctattacccaggcaccctaccctgtcaacaacactggccttcaagaccctttgtagcataactcccacctataactcccacctgaagccagcccttcccacctctgcgcctctgatgcccaggacagctctgaccatgggcagctctgacccaggacagctctgaccttgggcagccctgatctggggcagctctgacctcgagtagctgtgaccctgggcagctctgactctgggtagtcgtgaccctggggaactctcagcacgggggttgcatgctcctgtttagacagctgctgtcccccaagctggctcactatcccatgttggagtgcactgttcggggctgcctgcctggattgatgcagggaaacttggttccagcccacctcctcctgcggaggctgagtcaggggctcttccctcggccaggctgaaaggcagctgttggtccccctgtgaggtcttccacatggcctgggagagtctccccatctcttcaggcagaagggaggacagtccataatgttccttccagtcctctgacttgtcatttttctaccccaaatcttgcactttaaccccatagagagctcctgaagggggaattttaactggcaaaactcagaactccatccaaacacaaccgaaaccatcctgggtggcttagaggtggctgcctcccagacaagtccatagccccacagaaa

SEQ ID NO: 45361 - DNA, 1224 bp, Homo sapien
cggtcacagaaatcagaaccccttctccccaaagctggtcagaaaacctaaaaatattactcagttttccgtctacctttctatataagagctgactagagagaaatgatccaacatcccttgtttgactgtaggtcatgagactgtcattccagagagggccctgccccacgtccagagaagaaaatgctcagagacgaagacaaatctagacagaccttgctgggttcccactcagtctattcacattagatcaagccctttgtgtccaatcctttttttagaggactgttcatacgttattaaacctaaacataaaaatggacaatttcccccatcgttgggtcttcgttctaaaggttcttatatgtacacatcacataaatttgcataccgtttctcctattaatccatctgtctcatgtcagtgacttctcagcaaacctttaggggccaaggggccccacactctccagcggcaggcacaatgggcctggggtgcagttgtggacactcggaccctccttggagctggtttagctgtgctgtgtgcttgtgggaatggattgccatgatttctgggctctaataaattgtgcttcaatcgactcttgaggagttaatgagaggcctcacttcagaccataaacaccctccctgtgtgggatagaaacacacatcgtcacagccaggaggtcagtcgggtgagggtctgctttgcttacaaggtccagaaacccagcagaaaaccctcgaggccacatcagtgaagagtaacttatttcagcaacatttccatgtgtgacacaagacacacatttcctgcatccacctttaaagtcaagaagttgaagctgaataaagccagcaggcagcgaaaatcacctgcactcagttcagttgtggcaggaaagggaaagagccatgaagaaaggagagggggatggagagggagaaaggagagggggatggagaggagaaaggagagggggatggagagggagaaaggagagggggatagagaggagaaaggagagggggctagagaggagaaaggagagggagatggagagggggatggagagggggatggagaggagaaaggagacggggatggaggggggatggagagaagaaaggagaggagggtggagagcgacagctgcagagggaggcagggaggctggctgggcgtggacagctgcagagggaggcaggggaggc

SEQ ID NO: 45362 - DNA, 1993 bp, Homo sapien
ctgaaagagtgggcagaaaggagctgacctgggtaagtccaaaaacagtgttttgattagattctggaaagaatcaaataactctgcatatctaagcactaaactccaattggtaaaattgtttcccacagcaatacatgttagcaactttgaaactacttttatatatactaaggtttcacaaataagtcaatacagtagtaagagtcagggttctcacagctggataaggaagtcatggaaaagccagcggggaccctgaggtccatatataatatatattatacatatatacagatcagaatggaccctaaggtggtcggttatagacagatatgccagcaggaactcatgtttacatgatacatatatacagatcagaatggaccctgaggaccatatataatatatattatacatatatgcagatcagaatggaccctgaggtccatatataatatatattatacatatatacagatcagaatggaccctaaggtggtcggttatagacagatatgccagcaggaactcatgtttacatgatacatatatacagatcagaatggaccctgaggaccatatataatatatattatacatatatacagatcagaatggaccctaaggtggtcggttatagacagatatgccagcaggaactcatgtttacatgatacatatatacagatcagaatggaccctgaggtccatatataatatatattatacatatatgcagatcagaatggaccctgaggtccatatataatatatattatacatatatacagatcagaatggaccctgaggtggtcagttatagtcagatatgccagcaggaactcgtgtttacatgatacatatatacagatcagaatggaccctgaggtggtcggttacagtcagatatgccagcaggaactcgtgtttacatgatacttatatacagatcggaatggaccctgaggtggtcagttatagtcagatatgccagtaggaactcgtgtttacatgatacatacatacagatcagaatggaccctgaggtggtcagttatagtcagatatgccagtaggaactcatgtttacatgatacatatatacagatcagaatggaccctgaggtggtcggttatagtcagatatgccagcaggaactcgtgtttacatgatacatatatacagatcagaatggaccctgaggtggtcggttacagtcagatatgccagcaggaactcgtgtttacatgatacttatatacagatcggaatgaaccctgaggtggtcagttatagtcagatatgccagtaggaaatcatgtttacatgatacatatatacagatcagaatggaccctgaggtggtcggttacagtcagatatgccagtaggaagtcgtgtttacatgatacatatatacagatcagaatggaccctgaggtggtcagttatagtcagatatgccagcaggaactcatgtttacataatacatatatacagataggttaaatatatacacacacacgtgcgtgtgcatacatggcttagcacacacatctgtagatcctgggtttgtcctttgagaggggacaccccagtagcagcaagcacattccatgcccagatgttagtttctaaatttcatcttcaataaaaggagccaagtctccctggagaaatggctgataattgggatgtgggagagaaaatacaagatgaacctggagcatcttgtagtcccaggaagtaagaaaatgctcaaaaataaaatttttaaaaagctgtgggcatttcaaaagggcatggaacccaaaatgtaagagctcccagtggccacagctacaatgatttgagtgcacacacactcacacagacatacacacacacacacacacaaatcggattatgccccaaagaataaaatgaatgtccatggatttgtaagcatataaataaattattgaataaattaaaactgaaagggtagc

SEQ ID NO: 45363 - DNA, 1051 bp, Homo sapien
cgggaggtggagcttgcagtgagccaagatcacgccaatgcactccagctggggtgacagagcaagactctgtctcaaaaacaaaacaaaacaaaacaaaacaaaaaactgaaagggacaggcctttcttggaacaaattccaaacaagaaatgtggagtaaatagggaaaatcaccatcaggctgggcacagtggctcgtgcctgtaatctcaacacttcgggaggctgaggcaggtggatctcctgaggtcaggagttcgagaccagcctagccaacattgtgaaaccctgtctctacaaaaaaatacaaaattagctgggcctggtgacacatgcctgtaatctcagctacttgggaggctgaggcaggagaatcgcttgaacccgggaggttgcagtgagctgagattgtgccactgcactccagcctgggcaataagagcaaaactctgtctcaaaaaaaagaaagaaagaaagaaaagaaaagaaaaaaaagaaaatcaccatcagtgctgcaggcaagctcccctgaggaatgctaaaattcctgtgcaaagtttaaggagaaagaagatatttgtatactgtcaaagtgtctcccctaaatgttcagtaattaccatggtgcccaaattctttgatgctccttcctgtgggagttggagctcatgctggacttcatgactcactcttaaccagcaggacatggagaggaaaacagtcactctcccgtggggagacctggcaggcctcaccttggccgtgtgatcaaggtccagaccaccagtgatgaggcatgttgacatcgtggcccctgagagcacgtgatgagaagagcgctccacctctgccgtgttcttacgcaaacgcacagttccagtgtaatcagagagaacatcacacacacaccaattgaggggcatcttgcagaatacctgagcagcactctgcaaagctgtcaaggcagtgaaacgaagacaggccaggaaagggtcacaggtgcaggggactaaggaggcgtgagggccagtgcagcctggggtcctgga

SEQ ID NO: 45364 - DNA, 1110 bp, Homo sapien
aatatgcgtcgttggatgctgtatgacaatcaagctacttataacaaacaaaattgagaatgaaggtaaattaaaaataatttatagtctttaaaaagcaggaactacaaaatttacatttctgaaaatggcagaaaaatcccacatggctgtatatgtatgtgtgagattgtgtatgaatgagcgcatgcatatatttttgtgtgtttggattatatgtgtgacggtgtgcatgagtgtgtatatgatttgggggtatgtgtgagtgtgtatgactgtgtgtatgagtgtgtatgatttgtgtgtgtgagtgtgtacatgtatacactagtgtgcgtatgatttgggggtatgaatgtgaatgtgtacatatgtatttatgatctgagtgtgtatgagtgtgaatgtgaacatgtgtgtgtgagtgggtatatgatttgggtgtgtgcaagtatgaatatgtattgtgtgcattaatgtgtatattttgggctgtgtatgagtgaatgtgaacatgtgtgcacgagtgtatatatgatctgggtgtgtatgagtgagcatgagtgaacatgtgtgcatgaatgtgagtatgatttgggtgtgtatgagtgtgaatgtgtgcacgagtgtatatatgatctgggtgtgtatgagtgagcatgaatgtgaacatgtgtgcatgaatgtgaacatgtgtgcatgaatatatgatttgggtgtgtatgagtgtgaatgtgtgcacgagtgtacaatcggtgtgtatgagtgagcatgaatgtgaacatgtgtgcacgagtgtatatatgatctgggtgtgtaggagtgagcatgaatgtgtatgcacaagtgtgtgtatgtgtgtatgatctgggtgtgtaggagtgtgaatacgaacacgtatgcacaagtatgtatatgatctgtgtatgtatgagtgagtgtgaatgtgtgcataagtgtgtgtatgatctgggtatgagtgattgtgaatgtgagcatgtgtgcacgagtgtgtatatgatctgggtgtgtgggagtgagcatgaatgtgtatgcacaagtgtgtgtatgtgtgtatgatctgggtgtgtaggagtgtgaatatgaaca

SEQ ID NO: 45365 - DNA, 1905 bp, Homo sapien
cgttcccacaacagtgtgtgagggtccccctttctccacatcctcgccagcatcccttattccctgcgtttttgacgaaagccattttaactgaggtgagagaagacctcattgcagttttttatttgcgtttctctgatgattagtgatgttgagcattttttcatgtacctgctggccatttgtacatcttcttttgagaaatgtctactcaggtctcttgcccattttaaaattcgattaattgtttgctattgtttgagctcctggttatgaatcccttttcaggtgggtagcttgcaagtattttctcccattctgtgggttgtctcttcagtttgttgactttttcctttggtctgcagagggttcttagcttggtgtgatttcacttgtctgtttttgctttggttgcctgtgcttttggggccctactgaaaaagtctttgctgagaacaatgtcctggagcacttccctaatgttttcttccagtagttttatactttcaggtctcagttttacctttaatccattctgatttgatttctgtgtatggtaagagagacgggtctagtttcattcttctgcatatctttatctagtttcccctgcaccacttatggaagagaccgtcctttcgctcgtatgttgttggtgcctttgctgaagatgagctggctgtaaatgtgtggatttatatctgggttctctattctgttccactggtctatgtgtctgttttacgtgattaccaggctgattaccaggctgataggttggctcatgcctgtaatcccagtacctttggaggcccaggtgggaggatcacttgaagccaggacttcaaaaccagcctgggcaacaaagcaggaccccatctctacaatgttttaaaaaattatttggtgcagtggcatacacctgtagtcccaactacgcaggaggctgaggtgggaggatcctttgagcctaggagtttgaggctgctctgagctgtgattgtgctactgcactccagcctggttgacagagcaaggccctgtctcttaaaaaaaaaaaaaaaaaactattgcaagaggagagagagagactgaattcaactctcaatacaacagagacaagtggggatagccaatgagcagggtgagggaggtgatgaaaagttgttgaaaggagcttggttagttagcaagggtggggaagattctcactaaggaccttagcagcattccttgctagcactgagctcagcaggccaaggatgaggcttcatcaaggagaaggctcaaaggagcctgagtggagtttggtcaaggagagcgtctttgtcatccttgcaatgactcattttataggtaattaagtagggggttcagacaggtcaaagacttaccaaaaagaggaaattgtgtccatgtggctggtggctcaccccaggaactgacagtggcttactctcagaaactcagagtgtgcatgtctctttgaatccgtatctgtgtgtgggtgggtgtgtctgtctgtgtgcgtgcctcagtctcttctgaatttctctcccaatccccgtctctctttcctcgggttggtgtttccctcctgctggcctctggccagctatttctggaagtgtcagctgctctgtcttcctgcccctgtctccaccatcacgtctgtgtctgactccctttctttcccatacaaaacccctaatgcaagtcctactgtttctgtaactggccactgcctataacaaatctttgcttaggttgtgtttctttgtagaatagactgatgtactgtgtgcttgatttttacaagatgagcacaataccttatctttcttctttattaaaaaaaaggaaaaatccaaacacaagattaatatctcgtcatggactgtgccc

SEQ ID NO: 45366 - DNA, 2181 bp, Homo sapien
cgcctcggcctcccaaagtgctgggattacaggtgtgagccaccacacctggtccaagaacccaacttttagatctagagtgatgtcagcatgacattgatttcctgaggcccaggggtgaaggagctgaggacagcagaggggtgaaggaagtcagctacagacagcagcagctgatgcacaggcctcccagcgcctgaagtcacccggaattgggaagtgctcagaagcttacaaagctgcctcgaggtgggaacacaacattaatccaagagtagatccctgatcctataaaaatgtactagatgcagtgggggcattttaaatgagcagggcaggacagacagataaacagaaggacaaacagtattgggattgggataaatgctcagcttttgcccaaatcttagtgacttaagcatcacttatttgctcacgattctgtggctggaccatttggtttggctcacagggcagggactgtgctggtcttacctgagcagacctgcatgtctgcggtcaactgggttggcagagacagagtgactgtcttcctccaggaagcagcaggttaactggttggcagagacagagggactgagggactgtctccctccaggaagcagcaggttaactggttggcagagacagagggacagagggactgtcttcctccaggaagcagcaggttggctctggttccttcgtggggcagctggtctccagggcagcaagagagaccaagcccccgtgcacattctacagcctctgtgcacatcagacttgttaatatcccattggccagtgcaagtcacacggccaagcccagattaaggagtggaaagatggacgctatctcctcctgggagaggaggcaaaggaggtgagagcattatgtggccacttatgtttgcaatctaccatacttagccctttgagaaaagaattaactgagaaacttgcttcaaatagggcattcagtaaaatgaagccccaattgaagtaaaatgcatatataaaaaatgaaactgtgaccgattttaaggacagtattggcaaatatttctgtgctcttggaggagaagacccttattggcatgacgtgtcagaaaccacaatgaaagaattattttaacttgcattcataaaaattaaaattattcattaaaaacatcgtgaatgaaattaaaagtcaaaatgtaagccagaaaattatttacaacatatgtgtcaggaaaagacaatacccttcagactttgagagtttacatcagaaagaaaatagcaaatgacatgatccaaacttgataaaggacatgaaaaagagccagcacttagtatgttttctgaatgaataagtagccaacagcacatgaaaatgtgtgtaatccacttgtaagcagagaaatgcaaattaaaacagtaaagtgtcattttcacttcctggattggcaaagggttttatgtattttactgacagtgctcaacattagcagtaaacaacaaatggtgagtaaatacgagcttcggaacctcagggaaatgatctccttatttcaacctgtagattccttcctacaaccagtgtagagcagagtaccaggacgggccattgagcaccctggtgttgagagcaagtggcctctagtcagagttgggtcagggtcactgtgagtgggctgcccccaacatgagtcagctgtctaggactagtttatctctgcttctcactttactggtattatggggcagctcctgctgtcttccaatttggtgtcttccaaatcggcaccgtcttttaaagttgagtttcttgttattctcacctgatataccttatttatcccacacccaccccaataacatatcgtgctcagtgttatctttgagacaacacttgaattttactcagcctggcgtgctcttcacatgtcttgtctagatccagttcggactcattcttcagccgtgcatcagtaaatgggggctaggttaaactgtggtgacaaacaacctccaaatttcagtggctcaaaaatcttcttcctcatttatttacatttcatcatgggtcaggtgagaggtagctctgtgctgtgtcatcctaacacaggaatccagacggaaggagggacaatcagtaagatccccattgctatagaaaagagaaaaaagtatgcg

SEQ ID NO: 45367 - DNA, 1482 bp, Homo sapien
ggatggaacagtcagaatgcattcataaaatatgaactgaaaatatctggagaacagcacctatgactaccacgaatgccaacatgcatccctaacaacccagtgctgtcaccctccaaactttttatgtcttgcaaagtattagaacttcttatctgaagccataccactcagagggaatgcaaaatacatattgacatctcctttaggatgtccttagagaattcaaggaaaagaagttaaataatttaaaagtgcttttgggtacagctatttagcactagagggtaagattagacatagattgtaaagataataatagggttagggataggattaggatctgggtcagagtcagggccagaagtatggttagaggtggggtcatggtcagggtcgagatcaaagtcagggtcagaattagggaccaggatagggatcaggatttaggttcagtgtcaaagtcttgggacagggttagggttaggattagaaccagagctttgttctcctcaggacccacccgaggacgggtcaccatggctttggagcacctggtagtgtggcatgtccacagtgaagaccagagtttcattgtccttaagactgacctggggagacgtggctgcaggccattgaggaaggtgaggaaaaacttcctgtctgctccccgtgtgctgaggagggagctctgccgtgggctttactttcacatgttatattccacaagtcttgttttacaaaagcatcccttccttgaggcttcggctgctcatcgctgctcatcatcatagcgtgccataacatatagtaagatttgggtttgtttctggggagagatcttggtatagagaaaggagaaatgcttagagccaccatcaggacagttgggatgaaagttgggtataggcagaggctggaggaaacatgtgcatcccctgtaaacacttttattcatgttttaattactcatttttcttacagtgttaaattagtaaagatagtattgaaaaattgaaaagtaggcatattaaaacctgcaacactatttaagcttagatatattatttgtacctcatcaacattttttattttgttgagaaagtttaaggttaattgacagcatatttctaatagtagatagaataacatcccttttataaacattgacatcctacattacatgtgtgaaccctgaaaatctgagacagctctcagattttttagaaagtttattttgccaatcttgaggatgtgcacctgtgatgcctcctcaggagatcctgacaacatgggcccaaggtggtcggggcacagcttggttttatacactttagggagacacgagagatcaatcaatatgtgtaagatgtacattggttcagtccagaaaggtgagaaggccagacagggggcttccaggtcacaggtaggtaagagacaaatggtttcattcttttgcattgctgattaccctctcca

SEQ ID NO: 45368 - DNA, 3653 bp, Homo sapien
cgcagttaatgaaccaatactgatagactgttattaactaaagttcatatttcatttggattcccttagttctatcttactctgacccaggatcccatccaggatcccacacgacatgtagtcatcacataggctcttcctggctgtgacagtgtgttaggctttccatctcatgatgaccttcatagcactgaggaggattggtcaggatttttgtagaatgtcccccattgtcacttcatgttctcaaggtgaactgtcagctttggtgttcacttggatcatttggcagagctactgtttgtcagatttctccactgtgaagttatttttcctccttgtccatactgcatgtgttcttttggagcaagtcactatgcagagcccacacttacggagtgaggagttggctccaccttcttgatggctgagtgtctacatcagttatttggaattcttttgcaaaggagatttctatgcaactccatttgcttattcacctaggtatacaaatacagacacctagataattactttaagctttagttattattcgacactatagcattatgttgcacaattccttcctgtgttggccatcggtagctgtttttattggcttttatttttgtttgatatattttaatttttttagtacttactttctgatacttccagattatcctggctcctatatttactgtcccagttctagtatcagacatttcttcaaagagcctgattcctttcagaatggtgggaaaacttacatgtggctgctgaatgcacattgtatcttgtccctcattagcaatgctaggaagcatatgtgcgtgtctaacctacctacacacacctaattataaagttttctatgtagaactgtgtgtatctatattaaactaagcataagtttacgttgatgtctccacctctgatctactatcacaggaatcattctagccttctcgtcttgctaatttgtaacctcccacttcaacagtgagaaagctggttcccaccatctgcgacttatgtaagtcattgttttactccagatacagacactgtggttttacaattgttcacaattgcttctgttggaaagaactttataaaatggaatccaataatgaagtatagttcacgtgccttcagcctacagattctattcattttcaaagtttttacctagatttgtgtcttagtccattttgtgcttctgtaacagaatacctgaggctgcgtaatttataagtaaaacagtttcatttggttcacaatactggtagctggaatgtccgagattgggcagttgcatctggcggggcctcagtctttttcacctcatggtggaaagtggaaggggagcaaggggtgcaccagagatcacatagcagaagtgaaagcaagagggaagccaaggaagccagactctttttaattacctactcctgcaggaattatctattcctgtgagaacagaactcactcacccccatggaggacattaatctattcatgagggatccgtccccacgacccaaacaccgtccactaggccccaccgccccacactgacacagtgggagtcaaatttcaacatgagtttttgtggggacaaaccacatccaaaccatcgtaatttatagcataaattctttttcacatgatgtattctgtcctgggatactccacatcctgagtaatttgatttaatttgaatagagtttgctttaaccatttggctgtaaaattctgcatatttcgacaaatgcattgtggcagatatcccactattaaagtatcatatggaatgcctcaaacccccaccccatggagccaatggcttcccatctgtgtagtttgccttccccagtgtctcattaaatgaggtcacactgtgtgtatcctcctcagactgtcttcttccacttagcaatgtgcatgcaagattcactcatgtctttgtgtgtgttgatatcttgttcctttctatggctaaatagtattccattacatgaatgtagcacaatttggttatgcattttggggagtagaaccttcctcttctaactttgttccagggttggagaccttcaaattaactgacaatagatacattagtaggagagacaatacttggcttcttgttccccaagtatcattgtgggacaaaattcatcagatggcaggatccagtttacaaagaggtaaaaatagcccagaaacaagaaacaagactagaatctgataactctcaatggctatagttttcctttaaaaaaattttttttgagacagggtctggctctgtcgcccaggctggagtgcaaaggtgcaatctcagctcactgcaacctctacctcctgggtgcaaacgatcctccctcctcagcctcctgattacctgggactacaggcacatgccgtcatgcccatctaatttttgtatttttggtagagacggggtttctaccaaaatattcgattttttctgtggcagacaacatttatttatttatttatttagagacagagtcttgctctgtcgcccaggctggagtgcagcggtgcgatctcggctcactgcaagctctgtctcctgggttcacgccattctcctgcctcagcctcccgagtagctgggactacaggtgcctgccatcacgcccggctaattttttatatttttaatagagatggagattcaccgagttagccaggatggtctggatctcctgaccttgtgatccacctgcctcagcctcctaaagtgctgggattataggcatgagccactgtgcctggcacaacatttaaagtaataattggaattatgactcattactctatagtggcacatagcatggataaggaggacattgacaaacttccaggaattttatataatttctgaaaacataacattttacccatacaaatataacacagggaaggttaggtatctctttttatttgtatcttctgtatggttttccttataaaaaatgcaacctactttacttgcgaaacatgccctacttttcttgcatgctttgcatagagttgtttctagttattctattatttctagtagttttatttacatatattgattataattttaatacttagtaatcttttattttccagagaaaactaggaagtagacagttataaactgtcatatattagcattctatagtaggttagaaaatgtatgaatataccatctcccaacatctagagggatgtgtttcctcataatacaattcctcagtgtggcagaaaaaaacatgtttattaacgggccaaaatatctttagtctctctgtaaaaacaggaagccaaaagtatataaacttgaattatttatgttcagtaattaatgttttagtattgtatcttatttataaatggtctagatatttaatgcaaatcttttacttagcttaactttaaggttaaaaattaccaaaagtactttggaaactattcttaggcagatttactgtagacaaattatttttgaaataatgtttttcgcttttcacaagacggcaccgaaagcgaaggaagctcctgctcctcctaaagccgaagccaaagtgaaggttttaaaggccaagaaggcagtgttgaaaggtgtc

SEQ ID NO: 45369 - DNA, 2168 bp, Homo sapien
gggcacagtccatgacgagatattaatcttgtgtttggatttttccttttttttaataaagaagaaagataaggtattgtgctcatcttgtaaaaatcaagcacacagtacatcagtctattctacaaagaaacacaacctaagcaaagatttgttataggcagtggccagttacagaaacagtaggacttgcattaggggttttgtatgggaaagaaagggagtcagacacagacgtgatggtggagacaggggcaggaagacagagcagctgacacttccagaaatagctggccagaggccagcaggagggaaacaccgacccgaggaaagagagacggggattgggagagaaattcagaaaagattgaggcacgcacacagacagacacacccacccacacacagatacggattcaaagagacacgcacactctgagtttctgagagtaagccactgtcagttcctggggtgagccaccagccacatggacacaatttcctctttttggtaagttctttgacctgtctgaaccccctacttaattacctataaaatgagtcattgcaaggatgacaaagacgctctccttgaccaaactccattcaggctcctttgagccttctccttgatgaagcctcatccttggcctgctgagctcagtgctagcaaggaatgctgctaaggtccttagtgagaatcttccccacccttgctaactaaccaagctcctttcaacaacttttcatcacctccctcaccctgctcattggctatccccacttgtctctgttgtattgagagttgaattcagtctctctctctcctcttgcaatagttttttttttttttttaagagacagggccttgctctgtcaaccaggttggagtgcagtagcacaatcacagctcacagcagcctcaaactcctaggctcaaaggatcctcccacctcagcctcctgcgtagttgggactacaggtgtgtgccactgcaccaaataattttttaaaacattgtagagatggggtcctgctttgttgccaaggctggttttgaagtcctggcttcaagtgatcctcccacctgggcctccaaaggtactgggattacaggcatgagccaacctatcagcctggtaatcacgtaaaacagacacatagaccagtggaacagaatagagaacccagatataaatccacacatttacagccagctcatcttcagcaaaggcaccaacaacatacgagcgaaaggacggtctcttccataagtggtgcaggggaaactagataaagatatgcagaagaatgaaactagacccatctctcttaccatacacagaaatcaaataaaaatggattaaaggtaaaactgagacctgaaagtataaaactactggaagaaaacattagggaagtgctccaggacattgttctcagcaaagactttttcagtaggaccccaaaagcacaggcaaccaaagcaaaaacagacaagtgaaatcacaccaagctaagaaccctctgcagatcaaaggaaaaagtcaacaaactgaagagacaacccacagaatgggagaaaatacttgcaagctacccacctgacaagggattcataaccaggagctcaaacaatagcaaacaattaatcgaattttaaaatgggcaagagacctgagtagacatttctcaaaagatgtacaaatggccagcaggtacatgaaaaaatgctcaacatcactaatcatcagagaaacgcaaataaaaaactgcaatgaggtcttctctcacctcagttaaaatggctttcgtcaaaaacgcagggaataagggatgctggcgaggatgtggagaaagggggaccctcacacactgttgtgggaacattgattagtacaaccactatggaaaacagatggaggctcctcaaaaaactaaaaggggctgggcccggtggctcacgcctgtggtcccagcactttgggaggccaaagcagggggatcacaaggtcaggagtttgagaccagcctggccaacatgatgaaaccccatctctactaaaaatataaaaaattagccaggcgtggtggtgcgaccctgtaatcccagctacttgggagactgaggcaggagaatcactggaacacaggaggtggagattgcg

SEQ ID NO: 45370 - DNA, 1096 bp, Homo sapien
cgtgttcatattcacactcctacacacccagatcatacacacatacacacacttgtgcatacacattcatgctcactcccacacacccagatcatatacacactcgtgcacacatgctcacattcacaatcactcatacccagatcatacacacacttatgcacacattcacactcactcatacatacacagatcatatacatacttgcgcatacgtgttcgtattcacactcctacacacccagatcatacacacatacacacacttgtgcatacacattcatgctcactcctacacacccagatcatatatacactcgtgcacacatgttcacattcatgctcactcatacacaccgattgtacactcgtgcacacattcacactcatacacacccaaatcatactcacattcatgcacacatgttcacattcatgctcactcatacacacccagatcatatatacactcgtgcacacattcacactcatacacacccaaatcatactcacattcatgcacacatgttcactcatgctcactcatacacacccagatcatatatacactcgtgcacacatgttcacattcacactcatacacagcccaaaataatatacacattaatgcacacaatacatattcatacttgcacacacccaaatcatatacccactcacacacacatgttcacattcacactcatacacactcagatcataaatacatatgtacacattcacattcataccctcaaatcatacgcacactagtgtatacatgtacacactcacacacacaaatacacactcatacacagtcatacacactcacacatacccccaaatcatatacacactcatgcacaccgtcacacatataatccaaacacacaaaaatatatgcatgcgctcattcatacacaatctcacacatacatatacagccatgtgggatttttctgccattttcagaaatgtaaattttgtagttcctgctttttaaagactataaattatttttaatttaccttcattctcaattttgtttgttataagtagcttgattgtcatacagcatccaacgacgcatatt

SEQ ID NO: 45371 - DNA, 1591 bp, Homo sapien
ctcgccacctcgcctggctaccctttcagttttaatttattcaataatttatttatatgcttacaaatccatggacattcattttattctttggggcataatccgatttgtgtgtgtgtgtgtgtgtatgtctgtgtgagtgtgtgtgcactcaaatcattgtagctgtggccactgggagctcttacattttgggttccatgcccttttgaaatgtccacagctttttaaaaattttatttttgagcattttcttacttcctgggactacaagatgctccaggttcatcttgtattttctctcccacatcccaattatcagccatttctccagggagacttggctccttttattgaagatgaaatttagaaactaacatctgggcatggaatgtgcttgctgctactggggtgtcccctctcaaaggacaaacccaggatctacagatgtgtgtgctaagccatgtatgtacacgcacgtgtgtgtgtatatatttaacctatctgtatatatgtattatgtaaacatgagttcctgctggcatatctgactataactgaccacctcagggtccattctgatctgtatatatgtatcatgtaaacacgacttcctactggcatatctgactgtaaccgaccacctcagggtccattccgatctgtatatatgtatcatgtaaacatgatttcctactggcatatctgactataactgaccacctcagggttcattccgatctgtatataagtatcatgtaaacacgagttcctgctggcatatctgactgtaaccgacctcctcagggtccattctgatctgtatatatgtatcatgtaaacacgagttcctgctggcatatctgactataaccgaccacctcagggtccattctgatctgtatatatgtatcatgtaaacatgagttcctgctggcatatctgactataactgaccacctcagggtccattctgatctgtatatatgtataatatatattatatatggacctcagggtccattctgatctgcatatatgtataatatatattatatatggacctcagggtccattctgatctgtatatatgtatcatgtaaacatgagttcctgctggcatatctgtctataaccgaccaccttagggtccattctgatctgtatatatgtataatatatattatatatggtcctcagggtccattctgatctgtatatatgtatcatgtaaacatgagttcctgctggcatatctgtctataactgaccaccttagggtccattctgatctgtatacatgtataatatatattatatatggacctcagggtccccgctggcttttccatgacttccttatccagctgtgagaaccctgactcttactactgtattgacttatttgtgaaaccttagtatatataaaagtagtttcaaagttgctaacatgtattgctgtgggaaacaattttaccaattggagtttagtgcttagatatgcagagttatttgattctttccagaatctaatcaaaacactgtttttggacttacccaggtcagctcctttctgcccactctttcagcg

SEQ ID NO: 45372 - DNA, 1175 bp, Homo sapien
cggcctcccctgcctccctctgcagctgtccacgcccagccagcctccctgcctccctctgcagctgtcgctctccaccctcctctcctttcttctctccatcccccctccatccccctctcctttctcctctccatccccctctccatccccctctccatctccctctcctttctcctctctagccccctctcctttctcctctccatccccctctcctttctccctctccatccccctctcctttcttcatggctctttccctttcctgccacaactgaactgagtgcaggtgattttcgctgcctgctggctttattcagcttcaacttcttgactttaaaggtggatgcaggaaatgtgtgtcttgtgtcacacatggaaatgttgctgaaataagttactcttcactgatgtggcctcgagggttttctgctgggtttctggaccttgtaagcaaagcagaccctcacccgactgacctcctggctgtgacgatgtgtgtttctatcccacacagggagggtgtttatggtctgaagtgaggcctctcattaactcctcaagagtcgattgaagcacaatttattagagcccagaaatcatggcaatccattcccacaagcacacagcacagctaaaccagctccaaggagggtccgagtgtccacaactgcaccccaggcccattgtgcctgccgctggagagtgtggggccccttggcccctaaaggtttgctgagaagtcactgacatgagacagatggattaataggagaaacggtatgcaaatttatgtgatgtgtacatataagaacctttagaacgaagacccaacgatgggggaaattgtccatttttatgtttaggtttaataacgtatgaacagtcctctaaaaaaaggattggacacaaagggcttgatctaatgtgaatagactgagtgggaacccagcaaggtctgtctagatttgtcttcatctctgagcattttcttctctggacgtggggcagggccctctctggaatgacagtctcatgacctacagtcaaacaagggatgttggatcatttctctctagtcagctcttatatagaaaggtagacagaaaactgagtaatatttttaggttttctgaccagctttggggagaaggggttctgatttctgtgac

SEQ ID NO: 45373 - DNA, 1922 bp, Homo sapien
cgtttctgtggggctatggacttgtctgggaggcagccacctctaagccacccaggatggtttcggttgtgtttggatggagttctgagttttgccagttaaaattcccccttcaggagctctctatgggggtaaagtgcaagatttggggtagaaaaatgacaagtcagaggactggaaggaacattatggactgtcctcccttctgcctgaagagatggggagactctcccaggccatgtggaagacctcacagggggaccaactgctgcctttcagcctggccgagggaagagcccctgactcagcctccgcaggaggaggtgggctggaaccaagtttccctgcatcaatccaggcaggcagccccgaacagtgcactccaacatgggatagtgagccagcttgggggacagcagctgtctaaacaggagcatgcaacccccgtgctgagagttccccagggtcacgactacccagagtcagagctgcccagggtcacagctactcgaggtcagagctgccccagatcagggctgcccaaggtcagagctgtcctgggtcagagctgcccatggtcagagctgtcctgggcatcagaggcgcagaggtgggaagggctggcttcaggtgggagttataggtgggagttatgctacaaagggtcttgaaggccagtgttgttgacagggtagggtgcctgggtaatagcagaggaagaaaaaggcttagagttggagggaaaaacatggagttgggggagtgcacctgccccctcagagaccacaaagcctccccagggctgggctgtggctgctggagctcccagaccatgccaagtgtcagagcctgggcaagaccctctggggcagcccggaaccaccagaggtcagagctggaggaggctcagctggggcccttgcaccaggcaggaggcccagaaaagagacagtgctcttgaactgcaggaaggcagctccgtagagaggcaaatctcactccagctcgggcaatactcaactacacggacgtggatgctctcaagggggctttggggcatgtggtgtcggcattggacccaaatatgggctcaaagctttcctttaccatattccttctacatttttcttgcagattgagaagggatagggaggagtttagggaagtgagtgaagcaggaagatgttgaccaagggaagttaattccataaagaggaggatgaggggacagaaaggcaggaggaagaggaggaggagaatctttgcacagggggtgtcagctgatgggggcagcatgggtgcccatggagccctttaggggtcgttggttgtgtgcagagaggccacagcaggcgaggcaggcagtgtctaccacccccaaggagacaccaagaatccctgtccttaggaagtcccctcttcctcctcttgagtctcatctcggaaagagggagctgtcagtcagagctcaggccaaacactggggctaataggggtgagagcagggacctgtggggtcctcaccactgtccccttctcacctttctggctcaggccaggctcagcccccagtggtctattgtctttctatctgtcatctatctacctacccacctatctaaccatgccatctatttcatctatttttatctatcaaccatctatcatatatctacctacctacctttccatctatcatctagttcatctattgctatctattatctaatttgcctatcaagtatctatccatcatctatttctatcatctatccatcacctgttacctatcacccatataccacctatccctatctatcatctatctagccagcaatccacccatcatctacttcatctatttctacccgtctcccaccccctctccccacccctcaccagagagtatgcaagcacgacca

SEQ ID NO: 45374 - DNA, 3609 bp, Homo sapien
cagagtaaggatgtgtgtgtctacgcatgtgggggtgtgggtgtgacagggtgtgttctgtgtgagaacatgtgtgtagtgtccacatgtcctctgtgcgtgagtccctgtgtgtgatgttgtgttctcggtgtgagttcatgggtgtgatggggtgtgtgctgtgtgagaacgtgtgtgtagtgtccacatgtcctctgtgcgtgagtccctgtgtgtgatgttgtgttcttggtgtgagttcatgggtgtgacggggtgtgctgtgtgagaacgtgtgtgtagtgttcacatgtcctctgtgcgtgagtccccgtgtgtgatgttgtgttctcggtgtgagttcatgggtgtgacggggtgtgtgctgtgtgagaacgtgtgtgtagtgtccacatgtcctctgtgcgtgagtccccgtgtgtgatgttgtgttctcggtgtgagttcatgggtgtgacggggtgtgtgctgtgtgagaacgtgtgtgtagtgtccacatgtcctctgtgcgtgagtccctgtgtgtgatgttgtgttctcggtgtgagttcatgggtgtgacggggtgtgtgctgtgtgagaacgtgtgtgtagtgtccacatgtcctctgtgcgtgagtccccgtgtgtgatgttgtgttctcggtgtgagttcatgggtgtgacggggtgtgtgctgtgtgagaacgtgtgtgtagtgtccacatgtcctctgtgcgtgagtccccgtgtgtgatgttgtgttctcggtgtgagttcatgggtgtgacggggtgtgtgctgtgtgagaacgtgtgtgtagtgtccacatgtcctctgtgcgtgagtccccgtgtgtgatgttgtgttctcggtgtgagttcatgggtgtgacggggtgtgtgctgtgtgagaacgtgtgtgtagtgtccacatgtcctctgtgcatgagtccctgtgtgtgatgttgtgttctcggtgtgagttcatgggtgtgacggggtgtgctgtgtgagaacgtgtgtgtagtgtccacatgtcctctgtgcgtgagtccctgtgtgtgatgttgtgttctcggtgtgagttcatgggtgtgacggggtgtgctgtgtgagaacgtgtgtgtagtgttcacatgtcctctgtgcgtgagtccctgtgtgtgatgttgtgttctcggtgtgagttcatgggtgtgacggggcgtgtgctgtgtgagaacatgtgtgtagtgttcatatgttctcagtgtgagttcatgtgtgtgacggggtgtgctgtgtgagaacccgtgtgcagtgagatcgtccccaaaggtagttcaaagctggggccctttcatttgccaggatctaacccagctactcaggaggctgaggcaggaggatcactttaggccaggattttgagagcagcctggacaatatagtgagaccctgtctctacaaaaaaattttaaaaattagccgaatgtggtggggcatgcctgtagtcccagctactccggaggctgaggtgggaggattgcttgagcccaggagtttgaggttatagtgagtagtgatggcatccctgccctctatcctggacgacagaccaagagtccagccctaaaaaaaaaatttaattaaaaatttttaaatctttaaaaattaaaaatcttaaatttttctttaagatttataagaggactcagtaaaggctgtgctggcaataacatcaaactactgaattctttaagaactccttggagattattattttgcatgacataactaaatatcttaatgattgacttaattacttagatgtcagtctgtatgtttttggtgtcgtaagtacaaagcttagaactgctacttttagggccaggagcagtggctaacgcctgtaatcacaacactttgggaggctcagtcaggcggatcacctgaggtcaggagtttgaaaccagcctgcccaacatggtgaaaccccgtctctactaaaaatacaaaaattagccaggcatggtggcaggcacctgtaatcccagctacttgggaggctgaggcaggagaatctcttgaacccgggaggtggagcttgcagcgagctgagattgtgccattgcactccagactgggcgaccagagcgaaactccgtctcaaaaaagaaaaaaaaaattacttttaaaaccaagtactagctcatctctaagtaatactatttaagtaggcaaaagcccctggaggtcgcctgaactttttatactcttagctgaggggacagaagagaaatgatatgacatttacagaaacccctatgtggcctggcctcattggaattttttctgttagttaaataaagaccatttgtttctattgattaaaaacaaaattattcatataatgggttcaagaaaacaaattatttccctaatggacagtgtaggtcaggactagaagcaaacaaggatcttctatccctcacacatctcaacactcaagcaaaaactcaaagaaaacaatgatactgatggccacgtcatgcaccgtgctcacacaaggatgccaagaggcttcatatgtgttccttacctggacccttttcactggatcagaaacatggatgtcttagtctgataggcatcctctgctaatgcattttaaatgattgaatcaataatttgatgggccactttttataagatgctacgatatcctatgaagcactattaaaatattcatttttctgcacaccagatgtggcccaattgttaataaccaatattggttctctggcaaaaggagcaaaggcagccctctaagatattcctcactgatattccatttttcagtgggtagggagacatgagtaggaagcaaatctgggtccctgcacccacgatcttggtgccatcaaagtgccactgctggcaggttcctgggcaccatctgagaccaaccccactgtgaggttgaaggaggctgatcagaacagtggtcctccacctcctccctgacaccttgggaagatgacttcccaagtcatcttctatttatgtggtcttattcccataactggggccagatgatcccaccctgggaagactggggaaatacccagaatgctgacctgaaagtccaattttcccaatgtttctactgttcccatgtcaaaagtctttgggcaaaatctcccaggcttgagagatttcaatccagcctggatcacctctccacttcctccatcccagagtgaaattaaaaatcccatctgctgtcaatgaggagtcccttcaggccctaaagtttaggaagaggaatccctatcttgtcttcttcactgtcatcccagcacatcagttacttaaaacaacccaatttcaagaactgatagaccttcatttctggacacaccaaaaacaagcaaattccagaggatcagcttcagggtggcagaatggaaggagtaaaagccaaccacggggccaggtgcagtggctcacgcctgtaatcccagcactttgggaggctgaggtgggcaggtcacctgaggtcaggagttcaagaccagcctggtcaacatggtgaaaccccgtctctattaaaaacacaaaatattagccaggcatggtggcg

SEQ ID NO: 45375 - DNA, 1329 bp, Homo sapien
gagattgtggtgagccaagattgcaccactgcactccagcctgggtggcgagtgaaactccatctgaaataacaacaacaaaaagccaaccatgggatctgtggcacagctctcacttcaccattagctcagccaggactggcaagggagtgccgactggagaatcttatcctctgttccttagctgtttagatgtataaagcctgagggcttggcacctaattagggtttcagagctttgtttttctctcatctaattacatttgccctgtggggaagagcctctgtccaggaggcattgctctctgaaaatctgtctcagcccaacaacaggtgcgagaaggtgagcagctcctctccccaccaatgcggtgagatgctgagccaggccctggcttcttcttcctcctctcctttcattatctctaactccagtgtcagccctcaagcagtcccctgctttgtcacccctggcaaggtggggaatgttctcttaacctgcagctttctccttcaggaacaaagcgcagcctcttagcagctagcaatcaactcctgtgctcagggccttccagccagaccttctgcagtgcaccctggtagggggtaaattatcctgagcttggaaaatgtgactgaaatcacctccgacagagggaaatgggttttcataaaagacgtttcctcaccttcggttgcaactcaattcaactgaccatttcccaccctggatctcaaaagaaatttctgctttgcttctgggtatgagcctgggtgataatgaaaggtacttaggaagccaggcctattgaagcagcgtagccctcagaggggcatggctgacttggctaagagtaggacagggtgtggggttgaggaatccatggggactcagggcatcctgtcgcagacacaggagctgacccagccacagggtcacaggacagcctgtgtcaccacagtctctgtgcagagtccagagttcacaaatgagataaatggacatttgctgactggggtaactcagcatctattcaccctatttctgggaaaagcctcaatttacatgtgggaatggaccacccccttattgttataggagttattaagaaattattttaggcagatagagaggaaaagaggtccttgggaagtttttgtttcttttaaagcagatccagaaacctttcttgtctaacaggagagcgccagctctaagagtcactggcaagctttgatatgcaaacgcaggccactggaaactgagtccacccaaacatggagattccaggtttcttccttgccccaacaggtggctggcaacatggc

SEQ ID NO: 45376 - DNA, 1160 bp, Homo sapien
cgccatggcaggggagtcacaaaggagaagcactcagcctgccgagaggtcccaggactttcctggaggatcagtccccaaactgactgtgacagggagctatacccagataacagcagaggcccagaataagaaagagtctgtgagtgggcagaattccctccagggtcatgaggggagctgacttctgattagggcatttcatccttctctgaaatgcagctgagaactggtcagcctcactcccttgctgagaccaatagcaacccctgatgatctcgccacaggtccagcaggtgccccatccacactttgtccccagcccctaccaggaagctccaaacacctacctgaggggccaactctgattcccaaggaggtgacacctcctgccccttgttgatagaacattgataaggaaataggactgagttttaagcttctttccatgtcaaatatttaaaggcaatataatgttcacgtttaaataatatttcatgtgtaattaaacaatcccttattgttaaatagatgggttccaattttgaactgctataatctgtgtatgtgtccttgattaaatccttaagagaaatccctagaaacattatcttagggtcaaatggcttggatattctgtaaactgctgataattatgggaaattgccttccaggaaggttataacaatttgcctgatccccagcagcaacagactttacaaagtactcagtatctaatatttaactttgataaagataagcttctcccttctttttcacttaaaatgctgtgtcccacctcacttttcagtgtctcttcacactgactagacggttggctaatacttcagagcttgcagagcatctttatacacttttaatcctcctaacaaccgtgagagatggagcttactattatcatccgtgtttgcaaatgaggccctgagaagttgagtgatttctgtaaggtctcagagccaatagacactggtaatgaaataaaatgcaaggccccttatctttggagcccagtgttccttccacataggtggttctccacccaggctgcccaggagaatgtggaatctccagcagttctgacttaactggcctggtgtggatgtctgtgatgggtgaacattcccagacccttttaagaa

SEQ ID NO: 45377 - DNA, 5210 bp, Homo sapien
aaaataattgtcctgagtgggtctgacagaatcaagtgaaccctttaaatctggatctagaggtcagagactgagaatgtcagagatgcaaaagagattcagtgcaagagaaatcctcctactggttttgaagatagatgttggcaccctgtgtcaacaacctgagagtggccttgagttgctgggagcaccccagactgacaaacagcaagaagaatatggggacctcagtcctacaaccacaggaactgaattctactgacaaccagtgagcttgcaaagaggacttggagccccagatgagaagcaaccctggctaccccgatctcaaccctgtgagatcctaaacagacaatccagccatgcaacacccaaacttctgacctatagaaaccctgagataataaatgggcattgctctaaatcaccaagtttgtggtaatttgttacacagccataggaagtgaatcgacccgatgtatctgagcacctgctaggttatcattaagattactcttcaaaggtaaaaattatttttcaaaatgtttctgccctaccttccgtgagcatctggtgatggatggacacacacacataaaggtagactgtgtttaggtgggcatggtggtgcatacctgtggtcccagctactcaggaggctgaaagaggaggatcactagggcccaggagttcaaggctgcagtgaagctgtgattgagccattgcactcaaacttgggcaacagagcaagacaccagctctaaaaaaaaaaaaaactgctgaatgctataaataagattggaacttgctctgcttttacaagaccactgttagatgaccactgacaagaagactgtgagctggtctctgtaggaagcaggggcctgggcagctctgggggcacaggagacaggcctggggcagagacacctcagggcattttcagaagacagccaaagcagccattccagcttgtccaggtagatggcaagtcaatgggaaatcattccaggaaggtagggaaagatggaattctggagagcattggacctcagattgggagtctgaacgtctttccatatgcatcaggaagccatggaaaattcacagactggagtgactttggcaaaggtgggatttaggaagactgatcaaggcacgggatagacccatggatgaatggccttctggtcagtttgtccctgtggttttctatgctgaggaggtgggaatgtgctgggtgagtcagctgtggatttgtgtccctgcctcacctcactccccactgtcgtggatttgtcggctcatctttagtgcgctccctgaagaaacactcagttcactcagcttgtttctaacccaaaacactctgcagggcccatcctcttgtctttgcctggggatgccagaccatgcactgcggatgccttccgccttagcactagtgggctaaatgatgactgccttgctgtcccaacaccacccatcaaagggaagacatcaccactggggtcagtacagcccaagtgacaaactctattccctcctttctctccatcccatggacccttgatttgctaagtgggaagacactttctcgtggttcaacatcacctaatctgcacaattgcttctgcaggctaattcagccagaaaccctggatatctgggcagaagcgcatggaacttttagaaggattactactgcttttaatattccctctgtcttgagtcagaccaccaccaagatcagagttaatattatatatcaaagtcctgccatcagcctgtaggatttattactagcatctctccacttcagagctatgggaaccaatggaattggatctaaggttttgagttggctcttgtgcatggaaatttgatgcaaacactctaatttattggccctaaagggctttggcaagtcattttggcaagtcacccactgaacacagagtgaaatttgcagaggtttcccctctgctcgaacagtggtgttctcagcacgtacagggaagttctgcccccttccagccaggtgagctaggggattttgcctaccctttctgaacctcagttttctcatccataagatgggaataaaaacatggtcctggatgtatgtctcatgctaggcactgaggcagggtactctctcccctgaatgccttgctattgatgcatcaccagtaaggcatgcattcattgcacagaaacttaggcatatgcctaccaacatgcccgatgttgtgtgaggcctgaccgctgtgaggatggacttccatctgtgtgaatggattcatgagaccagccctcactctcaggactgagggcattggtgctctaacttgtctgaatatggaatcagctggagagattctgtaaattaccagtcccattccacccctgagatcctgatttcatcggtcttatttcattgcagcctggtcgttgggatgtttaaaactctccctaggaattccaatgtgcagccaagtttgcaactacacggagccaggttagtggtgcggtcagcatggtgataattgggctcatgaacccatgacctcagcttcatcaggagacccactgtaagtactggcccaacaggagggaaaggagctgagtcagatgataccactgaggggcatgagcaaatgaaaaaacaggaacccagccatgaagctcggcctgagtgttggagatgccactatagagaccctggtcttagcaatccagacttttccccagcagaagggagaggcgaagattatcctggccaggactgtgtaaggcctttgaaggttgaccatccatctcaccctgctgtttccctccttccctgcagaacagccgttcacctgaatgttccaggcttttggttaacaacccctggtcttttgtacccattcacactcaaaatcagggggaattccttgaaatggttaaaatgcaaaagtgaaatttagaagccctatgaatgaaacaacaatccaacaaaaaattcccaacactttaagcaaatgcttttctggcagagccttcaaattgctactgtcccactatcttctggaatcgtgtgtgtgtgtgtgtgtgtgtgtgtgtagagcaacaggtgaagcagcaaccataaggtagcctacttcaggtctggcacctcttttcactgctgtcatgccctcttcactgagatcctgacttaaatatgtacacatgtgaatgctgatttcttagcatgaattttaactcagctgttgctcgagcatcaatgattcccaattcccatcagagtgaatggccccttcctggtctctgcagtcagccctctgaagctgctcagctgaacccctgggagctgaggggccaactctgactcccaagaaggtgacctctatctcccttccagggccagagatgcaacatcacacacacactgtctttggaatgtgtgattaagcttttggctgccagtagcctgacagcttccagcagctttgtctgccaccgtgtccacttctctgtgccaaagtcactgaaacaaagggactgcagatgttgctgtgaagtctttccgattctccaggacagaggaaagcactacattgggtggggggtggagtggggatgatggactgtgggaaacctgcatgatgggcatgaaacaataaaaatgaagctgattttcttcatagcacttgctgccatagagatacatttgtttctgtgaccctctcactggaatgtaaactccctgaaagcaaggacttggcttattgctgtatcccaagagcctgacacagtgcctggcacatggtagacactcaatagatgtttgagatagggagggagggaggcagaaagggagggaggcagaaagggagggaaggaaggagcaaggaaggaaggaaggaaggaagggagggagggagggagggagggacatagacagtggatttggatagacttggctttaatcctttctgtagcaattctagctgtgtaaaaatacgcgagtgagtcatttattttctttgagtctctttcttcatcatagtaccaattaacagggctggggtaaagagtgatacatgtaaggttgctagcactattggcaatcaaaacatgagagctacttatttacattgtgagtattgctactactgatattatcatttctggacattactaatgatgtgagcactggcctttcatcagagattactggataaggaacatttaccgtcttgtctctgctcattgtgctaaagttccttctttatccaacaacactttctcctgttttcccaatttagtgaaaggattaatcttttcactctcattcttcctgttttgtttcccataatatgggtcccatccttcctcatgagatgggtatctcagcaattgagcccaccccacccacatatttgaccctgatccaagaccctcatttctgggaatgaaccccagatcagccatgatagaggatagcctggttttatctttttgcttctgagcaggatccaacaattctcataaaattttccccagcctgttcagtggaattgtcaaagcatcattttcaaaaagtgaaaacatgattcttatataagtctatagggagtgtgtataaagatctgtttacttcacaaaagaaagaaccagaggatggtaaagctgtttgaaaagagaattggaaggagaaagatttggatagaccatcagaaacagcatgctgacataagtttgctaatttggaaacctcactcattaatgtcctgtggagcaataaaatctttttacaggacaaaaatcatttgtatctctaccagacaaaaattaacatgtaacttggcagagtctgggccctaatcaatagtaaatagtaagtcaaacaaaagtaccttcccttagagagttaaaaaaagctttggtggtttgttaggcaaccttccagtatggcattagaaagacgtgcagtcatcctatttttacttccaagtttgggatacttttttttttgagatggaattttgctcttgttggccaggctggaatgcagtggcatgatctcacctcactgcaacctccacctccctggtccaagcaattctcctgcctcagccttcccagcagctgggattacaggtacacaccaccacgcctggctaatttttgtattttttaatagacacaggattttacca

SEQ ID NO: 45378 - DNA, 1088 bp, Homo sapien
cgcccaccttggcctctcaaagtgctgtgattacaggcatgagccaccatgcctggccaagttcaggatacatttttaaaacaaaattggtccccctcagcctggtggatgtccctgcagaatttaaaaatactattatgttctagatgtctgatgctgtcaattctcaatggccagaagagggcatctgcccagatcagttcaggtgtctatccctggtctgatcgcctgtgcccacggtagcgtatcaggtacacggcgctgtttcttccctgctattggtagaacagcttttccaagaaggggataggctggaatggaagaaaagagtccaaagaggaaggaaccacaacagaaagagaattgctttcctttcagttgtgggagcaccagcttaatgcctcttttccacatttgcccagcagaggaaatgtttgggccgaatgacagaaaacctagggtagcctttttggtgcctcctgacaatcacagaagcaggctgggatcctacccaggtatggcagagcaagtgagcccacctaggtgggaatccttaccctcctaatcctgcaggttcacttcacaatcttgtgtagaccttaaaccattgtttagacagttatatgaaatggggtattttctagagaaaaggacagtgaatggggatatggggattttttttttttttttttgagacagagtctcactctgtcgcctaggctggagtacagccatgctcccaagccatgcttcctgtatggcctgtggaacatagagtcaattaaacatctttcttttttttttttttttttttgagatggagtctcgctctgtcactcaggctggagtgcagtggtgtgatcttggctcaatgcaacctccacctccagggttcaagcaatcctcctgcctcagcctcctgagtagctaggattacaggtgtgtgtgtgtgtgtgtgtgtgtgtgtgtgtgtgtgtgtttagtagacacggggtttcaccatgttggccaggctggtctctaactcccgacctcgtggtctgcccacctcggcctcccaaagtgctaggattataggcatgagccac

SEQ ID NO: 45379 - DNA, 2868 bp, Homo sapien
cggtttcaggtagttcttcatagcaatgcagactaatacaactactttgagtctcacctttccttatttggaaaaatatttccattgaagtgttatggtgaagattcaatacaattaaatgatataacatatgtaaagggcttagcaataacccaatggctaataagcagccaaggagtggtagctctcagtatagtcagcctctaagaagagagcaaatgtttattttcaagaagaattatgcagaaagggccactttcagtctaccatccccccagattccttgaaggcaggatgatgtgagcagcaagggaagaaaggggagtgggcacgaaatactacagaacctgcagggaacgaagtccctctgtctgtgtgtgcctatatcaataacttaaacttacacattcatgagatgcactgtgtttattaggatgtacatgtgtccctaagaatctgagagctcctgagagacagagacggtgtcttactcatctgctctccccaggtcctcgcttactacctggcacttattgggtaataaatgtctgttgaatgcatgaaaaaagaaaggtaggaaaggtgtgaaggagaagatggaggtcatgaccagtagaaatctcagcagttctgcctgggctccatgtcatctccctgctattaggcccatcagaatgtaagcacaaatgcctagagaatgacaagcttctttgggactctgctgactagacatgacataagactggacagctcctggggaacttccaagagctggctccaggcagtgactaatcctaggagctgctggcttggctgcctctctcccttccttatttccaagattggtcacctcctgctctgaaatagcaattgattttcagacatgagttgatagaaccatgattttctaatactgttccaaagaggctaaagtacctctgaggagcagtgcaggctaggatcaaactctccctaccttccactccactccctaccttgcccctccacctctgcccactttctatttcttcaggcacagcagcttctaccttatggattacaaattctgatcatctatggttgcattaggaaaagagtactgctactttcattttcttttctaaccactgccctagaagaataacacctcacattctctggtagactgaagcctgcagctgcaaggatgctcagaaaaccagacttctattcattggccacttgctgcacgctctgtccctcgatccttgcaacgtacctttgaggtaggcacaaaaattcccatttacaagtgagaaaaccaaggcaaaagaggttcagtttatttcaggctcaaatgtgcttccaatagcttatagcctctacagctagtgtttgaacccaggtctgaaacaaataggattgacaaggggagggaaaagaggaacagaaattcttttctataagacaattgtttatgcagccaggatttcttaaaatccagtttgtgcctacggacataatctttgaatttgctttgtttctcgatgaataacttggaagctattcaaataacttggaagcttcctttaaaaggaacatcaggaggtgatttttgactaaccctaggtgtcctttctgagccaaatagattttcaaataagaaaatgagaggacatgagcttgaggaaaatgataggcattccaacctcatccgcttgctgacgacctccacgtgatttcaacaatgatttcaaatatttcactttttaagtcagtgtgacttaagtatgaaattgcctctccctaaagctcccctaaggcctaaacagtcgtcattaccatagctgtgacagggagactgttgaatttataatctattggccattcacagcatagcgtataaacctagctcatgatttctttgcaatagaagtgtactttttcatcacattcccttcacaacttactcaccagatcagactttgagctctcctcctggcttagcctggatcgtttgaaatggtcatccatcctttggccccaatacctaaactaaggtctatgaacaataagatgattttcttcagtgggacttttttgtttaatatattagatttgaccttcagcaaggtcaaagggagtccgaactagtctcaggcttcaacatcgaatacgccgcaggccccttcgccctattcttcatagccgaatacacaaacattattataataaacaccctcaccactacaatcttcctaggaacaacatataacgcactctcccctgaactctacacaacatattttgtcaccaagaccctacttctgacctccctgttcttatgaattcgaacagcatacccccgattccgctacgaccaactcatacacctcctatgaaaaaacttcctaccactcaccctagcattacttatatgatatgtctccatacccattacaatctccagcattccccctcaaacctaagaaatatgtctgataaaagagttactttgatagagtaaataataggagtttaaatccccttatttctaggactatgagaatcgaacccatccctgagaatccaaaattctccgtgccacctatcacaccccatcctaaagtaaggtcagctaaataagctatcgggcccataccccgaaaatgttggttatatccttcccgtactaattaatcccctggcccaacccgtcatctactctaccatctttgcaggcacactcatcacagcgctaagctcgcactgattttttacctgagtaggcctagaaataaacatgctagcttttattccagttctaaccaaaaaaataaaccctcgttccacagaagctgccatcaagtatttcctcacgcaagcaac

SEQ ID NO: 45380 - DNA, 2949 bp, Homo sapien
cgatgtaacacgagaaagcacataccaaggccaccacacaccacctgtccagaaaggccttcgatacgggataatcctatttattacctcagaagtttttttcttcgcaggatttttctgagccttttaccactccagcctagctcccaccccccaactagggggacactggcccccaacaggcatcaccccgctaaatcccctagaagtcccactcctaaacacatccgtattactcgcatcaggggtatcaatcacctgagctcaccatagtctaatagaaaacaaccgaaaccaaataattcaagcactgcttattacaattttactgggtctctattttaccctcctacaagcctcagagtacttcgaggttaaaatattagatatttcccctgatacagggctcaatctttttctttttaaagcaatatttctcaaagtacttttcacagaacttaagtttcattaagcacttcactaaaagaaaagtctgtgatctaataaatttggaaaatattgagaattagagccccctcttagatatgtactgtagctactcagcttgttacagatgaagtaaacattgtaatattcacccagcttttgagtgatgtctattaacatcacccaaatgagtattccatggaatgcactttgcaaaaacctattattcaagaaaattctggagcatgaaagctattaatgataaacccattcacaaaatcacaccaaatatctaaaatcatgtttaaaatctcctagaaatgggttgaattgcccacttcagagacaaagtgattcttttgtaataacgagttttgtttagtgagtacttattatctcattgaatcctgaggactacctcacaaggtaagtatagctcttttcattacacatgacaaacaaggctcagagaggttaagtaacttgctcaagatcacaaaactgcagagtgacaaaactagaattttgaatctaagctcaaaaggtcaccaaaccaaatttgggtccacccacccagcctatcaaagtcaagcactgatatcggcattgctgagacagaagttgaggaatttattgcaggcagcaagcaaggagtatcaggcagctaatccttaaggcctaatctccctgatggcttatgtgtaagggtttttaaaggtgggaaggcagaggttgcaggcaaggtcatacaatacatggaggctacatattggtttggccaaaaaaggcaaaatatctcaaagtgagggcccacaggataggtgaccattagatgaattcaaagattttctgatttgagaccaggtgcagtggttcacacctgtaatctcagcgctttgggaggccaaggtgggtggataacttgaggccaggagtttgagaccagccagaccaacatggcaaaacaccatctctactaaaaatacaaaaattatctgggcatggtggtgtgcacctgtaatcccagctactcaggaggctgaagcatgagaatcgtttgaacgtgggaggcagagggttcagtgagctgagatcgtgccactgcactccagcctgggcagcagagtgagactctgtctcaaacaaacaaacaaaaacccaaagattttctgatttgtgattggttaagttttggctacaaacttggggtcagcagaaaggaatgttctgctctggcctgtgggtgtgacttcctccaggtccctcaggaagaaatttagaacaaagaacagttgtgagtgttcagtcctcagttcctccttatctgagatctacgagccaacaggtggtattttccatttagcggggtctgggtttctacaaaacaactcagggacatatgttaagatgttatctctagtttctatagggaaacaaacattttgtggctctaattttctttttttttttaattatactttaagttttagggtacatgtgcacaacgtgcaggtctgttacgtatgtatacatgtaccatgttggtgtgctgcacccattaactcgtcatttaagattagtttgtggctctaattttcttgactattgttttaagctattattaccttcttacttatcagggtgctcatctacttcttgaggctagccaggtggctggaattttccttggagggactcaagagtttcctttatttttcatgccttaaatgggtctgttctccctcttcaaagctcaagctcttaaggactatgctattgttagatttttcgtattggagcagtccttccctcctactcaagaacaccccttcttcagacagcctggctgggtcttcatcctgggagagctcatgaaacacaaaccagatcttggccctcacgtgtgtctaggcagagctgagcctgggcaacaccaagcgtgcccccaattttgcatgccccagccaattcagagtcaagatccacgctcagctccttccctgcaaagtgctaatgatgaaggatggggatcaagtcagcaaactccagaaatggtcttagactaggagtcaagccttgagatcctattacacaccagattcattccctgattagagctgctgaattcttttactctcactgcactcatgctaaagtttctttcctccagcctcataaccccagaggaggctgagccatgatacccattgtctagcaataaatatttaaggagcccctgagatatgtcaggcaccatcgcaggtgctgggacaagtgaatgtgaccaggaaagtccctcccctctcagaggttcttttcaagttggaggacagcaaatacagaaatatagagtctaacataacaacagggagtaataaacactttgaagaaaaataaagtggaataagagggtagggttgccatagggttctctgggcagtcttctatggaaaggccacttgttggggcagagaaaaaaaagatgtctgaaaggaggactac

SEQ ID NO: 45381 - DNA, 2382 bp, Homo sapien
cgggaggcagaggttgcagtgagccaagatcgcaccactgcactccagcctgggctacagagtgagactctgataaataaataataaataaataaatgattccctaggaagctgactcccactgaatgtgccactcaggagtccctgctctctagattacagttgagtttgctcaatgcaaggccccagcagaaatgttgaaagtaagagcaaatagatagttaaccactctttaagacaacaatggatgtatacttctctggcctcagctcctgtggggaagctccagtgccagtccctgggtgcttcaccattttccgttagttcctgaaccttgtaaactgacccttcactaaattcttcctagttaaccctttgagaatgaaaccatttcctgccaggactctgacagatacaaagaacccacagccgactgctgggtgcgcggcagacctagtgcatggctccacactgccatcttgggggctggcacaggctggcactgagtctggggaagggagctggggctggaggtgtggaggggaagaccgtgcatagttgcttcctgatcagctctttattcgattgagagtgaggcagggaagattagagggaagcttacagtggaattcagggctgaggctgctattcttttgctccttgtaacttcctacagtgttgtcagcatccacatacttctctgtggggttggtctcagagccaggttaccttgtcttaggtccagtggcagcctgactggcttggtgtccttgaacaagttacctaacctctccatacctcagtccctcagctgtaaaatttttttaaaaaaaaagaagaagagtacctactgtatagcattgatttgaagattgaatgagctggtattatacaacgtttagaagcagtgcctgacatgcaaaaggctctcaacaaatactatcctttactaatatcctgtgtgtctgtatcagagctggtggggtggagggacagaaagaagtaggagaaggtaaagagatgggaaaatgatctctaaagtctctctggcactaacacaattctttattatgtgttttgtctggctctttatattgatagctgttccagaagcaatcaatagctattagtcggttttattcttatttttctgtctgatcttacaggggagcaaactgtggcaaagcatgaacttacttctcagaaaattaaccattatgttggcaatcactgtgattatttgaacttcagcatctggacaaatttagtcacatgaaatacagaagagagatttctcatggttaaaatgaagctctctttatttgcttctgctaattaaaaaatcagagctaaagatacttaaacactacagttaaaatgccatggttgtctattggcttaatgaattctcttatgaaatcaactctaaaatgttatccatcataaatcatgaaacacaatttttcttattctctttagagctttacaattcatcttaaagaccagtgtttacactctcttccgtaggttgtacaataacctttggcgagaaaaaataaatgtctggctttctgactcataggtgtgttccctttaacagaaaaagaaaatatgtcctctttaaaactgatgatcattggtcacctcaattttattgaagttcacttctgacctctttagatgtagttctctacataaaactgcccaacagaattctctgtctgaatgcctcctccacaaacaaaattttaagaactaaaatcatcatctttccttccaaatgtgctctccctatgtccccagggctctccatgtgtagagctgagaccatttgccactcagtttcctcacccaattaattacaagtcccaacaattttccgttgtttttttttttttagacggagtcttgctctgtcaccaggctggtgtgcggtggtgcaatctcagctcactgcaacctccactgcctgggttcaagcgattctcctgcctcagcttcccaagtagctgggattataggtgtgtgccactacatccagataatttttgtatttttagtagagaggggatttcaccatattggcccagatgatctcaatctcttgacctcatgatctgcccaccttggcctcccaaagtgctgggattacaggcgtgagccaccatccctggcccagttttgcctttttaacatccctcagctcttcaaatccattttctcttctctaacacctccccattccccagctcgtaatgaactcttaagtagattactacgatcacctcccaaatggtcttcctggctccatcagccttgtgaccttcaagttcattctccacatggatgtcagagtaactttctaaaatgaaaatctgacca

SEQ ID NO: 45382 - DNA, 2602 bp, Homo sapien
cgctgttaggatcaagtctaaactcccgaccctggaacatcaggtctttgtgctctgttcagtgcttctctacctcacctgcaaccaacaccactcccacatccatattctgctcaccgtgtatcaacatgaacaggaggtgggtgcttcagtccccaggaagacactgggccttttcaatcatctactgctgtgtaataaccaccctgcaaactgaccacatgatttcattttgcaagggttccttccttgggctgtgttcagcaaaagggtttactgagctggcaggtccaagatggcctcactcacaggactggctgttgatgggagccttgatgctcttgggctcaccccttatcctccagtaggttagagcttcttacagtggtttcaggcagcatctgaagacagtaaatgcagaagctccaaggcttcttacattctagcctggaaaatcacatcacattgcttccttcatatttttttggcaaatcaggttgcaaggcttgcccagattagggtaaagaggcaaagaggctccttttcttttctttttcttttttttttttttgagtcagaatcttgctctgttgcccaggctggagtgcagtggcgcgatctaggctcactgcaagctctgcctcctgggttcacgccattcccctgcctcaggctcccaagtagctgagactacaggcacctaccaccacgcctggctaatttttttttttttttgtattttttggtagagactgtgtttcactgtgttaggcaggatggtctccatctcctgacctcgtgatctgcctgccttggcctcccaaagtgctgggattacaggcgtgagccaccgtgcctgaccaagaggctccttttcttgatgaaaggagtagtgaagtcacattgcatgtccttgcaaagggacatgcagaccacattagtgagaatatgtgcctgtattttgcaatctgtaacatgggcataaactaaatgttttccaaagggaatagggcaaaacaaaaaggaccttgaccactcctttggccctgaataaatctaggaagcctaagagtatgactatcctgaggtagaaagagggtcacatgctggataagaggtacctgggctctccacttacaagaagagagcatggttacatttataatcaccattcccaacacgctgtgagtgcaggcagctaccaggaggagaacaaaggaaataaccaggacacccatctctaaacctgttaatttaatcacacggaacacttctatttaaaattcccgagggttaagatgtaagaatgcttatcaaggtaaatgctgttcacactgcttggagtgtcaggcctagatctctatccatcagaaacaacaatatcaataacaacaacagcaacatgatgatggggcaatttctgaaaagcaccatgtattttatcgatacatgtccgttgcagaaaatccaggtgaatccaaagaagaaataaatgtcttccacaatcccatagcccagagctaactaaccactataaagaacccagcgtggttttaactaatggatcaaaagatgctcatcaaaggctctgagctttcctgagtgctaacaggaaacatccagcatcactggtctctccaaggctgcaggtgtctttgcccatagtgcctgttttgtgtcagggaaagaatcaacctgggagccaagcccaggaatcaggatgaccaagacatactggacaaggagggaacaaacccatccaaggacactcaaggacaaatcaagcaaatgaatttaagggagacctgctcatggtctgctttgctgctcagcatggctgggaggcacagtggaagatcatgcatccttcccctgggactcctctgccagagcctgagagctttctcctgcacacaggctaggggtagggcagttggaattgatccatgccttctagctagactgtgggtcccctcagtcttgggcatggtgacagcccagcatcagacagaggtcagtatcaaactagaaaatttaataaatgctgtcagatttgtagacccaagaaaatataaactgccaatcacggaggaaaaaaatctctcaatgatcttatctttatatgattcccttgctgcctggagattgacatttccttggggataatctggtcataggattggtgaaggtggaagggaggcaacctccgaaggtggggccctctgctcacctgggacagggagggcctgaggtaggtgtctgtgtgggctggggaggaggatgggagcagtgcttctagatgtttccactttctcctcattagataataatgaatgggtgatttccctagtcactgcagtgtgaggaaatctacaaaattaatttcacaatacactttacaggataggtggagaaacacatgaagcacaactgcagtgggttataaaaaatggcctttcgagttgagcagtaaattcgttcaagcagccattctgaaggacaaactggctctgtatttaacaggggcattccagcacttctctagctactgggttgacaatgactcaccaaagcctctggtagccaccacaggacgcccaga

SEQ ID NO: 45383 - DNA, 1067 bp, Homo sapien
gacttcgggagtaagtgaactgactggtttttattttgttttactgcttttaacattacagtaactgttacaggttccagcaggataactgggtggaaatgagtttggtttcacttagtctctctaaagagaaagcaagttggtagactaatacctaataaaagcaaagctgccaacaattgaaattgcctggactgctctgtgtgtcccacatgcatgggtgtgggtgccagtgtgtgtgcgtgtgtgcatgcatgtgcatgtgtgttgggatagagtggtaagaaaatgggaaataataagaatgttcagtccatagcccttcattataaaaaggtgagctgtaataaatactagtgccacatttagccaaaactttactccagccaaaggtgatattttcatgataacatcctgtgattgctttgttcttcgtcttttatgttcttcctagatgggctcagaacatacaagaattaagtacacatcttattttccagtgataatgctaccggcaaattctgttgtttgtataaacatcagccatgtttatataactaaactagtgttttgttttgtcaattcagcaagaaattagaccacatggtggcttaatgctgcattgatttggctatcaatttgttttcacttttctgcaaaatatttaatacattattaaattgaattatgctgatgccacagttgttcttatctcaattgtcttaaaattcatttaatttttttttcctttggtttcattattcaaattttaacttcagttctcaacattttatctgatggaagagatggagtccattactaaggactccattgtgctccatcatgccagagttgtaaaatagatcttttaaaggaaatttactgtgatttttttctatttaagagcttcctctccagttgagcatgtaagaaaattataccaggagaatacagtaaactctatgaggcaagctataaacatgtagcattgtgattagggctggttctccttctagagacatggtaggattgcaatttcataccatccttgaagttagagagagcca

SEQ ID NO: 45384 - DNA, 1171 bp, Homo sapien
cgttttccatgtgctgtagccttatacccaaagcctgggtcccaagtgaccatgacaggcagagctccctgttgagccacagagatttagagaatggctgttaacacagcataatccagcccatcctgactaatctgatattaacatgtataataaagaattctatcaatgctgagggaagatgattagttaaggtcctaggttgcaagtctcaaaacctcttctaaggattgtagacaggaaattaaatgacttctagtccctagagttcccaatctcctaccatcccatcctaatatgacagaagtaattcctgagttgcttctgaaaccagagcttccctcagaacccttagcctgccagatggcttcttggagagccctcactcacttttctccttctgctattgctgctcattcattccagcttttaaaaattcatctttatccaggaacctcgcttctagaaaagtcatacaggtgcttccaggaggctacatgggcacccatatttttctagccactttcattagaccaatgcagcagagaagaaaagcctcaataattattatgacatggcatgttaggataccaggtaaattgcatttgtaaaatgtgattttctgttggtgttcacttcggctctactgacatttggtaagtattattgactgactgactaactaatgtggtcattagtcttcataaagaaaggctctctacaaaaacggagggatgccctttttctggcatttaatacgtaagaaattgcctccgatagaaaccagagttgcctgattactatcagcacaggagaaatgtattaatgtgcctttctagtaacaggtttttagaaagtcaaatataaacaaatctgtctatttgtgtgtgtgcatgtggtagtggggagggaagaaaaaaggagggggagagaaagagaaataagaaccaagtttattatactgtattcagggggaaaacattttcccaaggttctaacagaagagcaaagtgccactgtcaatagcctcagtagtgtgagggttgcttttatgtatttatttatttacttatttatttatttttcctttttttttcctttctctttttttcttctttttttttttttggacagagtctcacactgtcgcctgggctggagtgcattagcg

SEQ ID NO: 45385 - DNA, 3621 bp, Homo sapien
cgcccctggccaggattgcttttatagccagtcttcaggtgcccactgtaggaacaatgtcatttagccctcgggattattctgtgccaaatatggataatgactaatattcaacacagatattctcagctcagaagagcaattagcaaattcataaattaagtgcttgcttcctttttagtcaaatacaaacatttgttaaaagatattattttgctttacactttgtctctcagaaataaacagatgcttgaattcccacagtgctgcttgagcctcacaccatgtcatcctgccaggcacccagatccagttctagagtttcacatgatcatgagtgttggttaataagtcactgtgaactgggaggggagatttttcaggagtgccacagggctctccctttaatcacatacactccctgctttcattggaaagtgtataatgatgtcagagtgccccagaatggagctagttggaagactgccgtcatagggatgccttagtgaatcaatcaggttttaatttctggctctcaactttgtagatgtaaaagttgatttatcaatatgtgagaaaggatgaatctttctgaaggttatgtcatcacactcactaagcacacagagaataatgtctagaatctgagtgccatgttatcaaattatactgagactcttgcagtcacacgggctgacatgtaagcattgccatgcctagtacagactctccctgcagatgaaattatatgggatgctaaattataatcagaacaatgtttggtgagccaaaactacaacaagggaagctaattggatgaatttataaaaatatacctcagccaaaatagcttaattcagtctcccttatcataaggatactcttgcctaaagggacagtaatattaaagacactgggaataacctctgtactttggacagtagacctgcatagcccattaggcctcaatgaagtcttatgcaagaccagaagccaatttgccattttaaggtgattctccatgtttctgctctaactgtgcttcacaatactcaagacactgaatcaggatgtttcctggagtgcagggagctgtccgtgttactgagcagttctcagcaacacaaagatcctactgactcctcatcagacttctttctcactggaattttacacctgggctgttaacaccaggccaggtcaaattcaaaggagagaaaaaagctcattatgaagggtaaaatccaaaacactgtgcataaagatatgtgtgcacaatttttatacataaagatttcataaagccaaagcatcaggaaatgaaaagagatacagaaagaaaaatgatggtaaatgagacattaatttacccttctaatctctatcacagcaaaaaggtaattaaaaaatctatatgaggaccaaaaaatacacaaagattatgtagcaaagcctatagcctaaaaaagtaaacattgaaatttgtatgtccataaaatgtttacaaaattcagtacatattacacaccccaccctaaaaacatctaagcaaagtagagaatgtagaaatgctacagattatattctctgattatgacacgacaaaactagaaattacagcatggaaatttaaaagctttctcttaaataattctatgtcaaaaagaaatccaggccgggtacagtggctcatgcctgtaattccagtactttgggaggccaaggtgggcaggtcacttgaggtcaggagttcaagaccagcctcgtcaacatggcgacaccctgtctctactaaaaatacaaaaattagctgggcctggtggcgcatgcctgtaatcccagctacttaggaggctgaggcaggagaattccttgaacccagaaggtggaggttgcagtgagctgagattgcaccactgcactccagcctaggtgacacagcaagactctgtcaaaaaaaaaaaaaaaaaagaaatccaaataaaatttccagaatatgtggaaaatagtgacaataaaaatattacacatgtgtaatcccagcattttgagatgccaaggtggcaggatcacttgagaccaggagttcgcaaccagcctggacaacatagggagactccatctccacacacgccaaaaaaaaattttaaatagccaggtatagtggtacttcttgtaatcccatctacttgggaggctaaggtgggagaatcacccaacctcaggagttcagggcttcagcaagccatgatcatatcactgcactccagcctcagcaacagagcaagatcctatctcaaaaaaaaaaaaaaaaaatcacatgtgggaaatagctatagcacaataaaaataaatgtattaagtatgaacaacaaaaaagctagtaaaggttgaacaacaactatccttaggaaagtggaaataatgtgttaataaatatgaaagcaggctaggcacggtgactcacatctgtaatcccagcactttgggaggctgaggcaggcagatcacctgaggtcaggagttccagaccagcctggccaacatggtgaaatcttgtctctcctacaaatacaaaaactagccaggcttggttgcgcactcctgtaattccagctacttgggaggctgaggcaggagaatctcttgaacctgagaggcagaggttgcagtgagccaagatcatgccactgcactccaactggggcaacagagtgacactccatctcaaaataaataaataagaaagcagaaactaataaattagaaaacagaaacatagaactaatttataaatcaaagcactatgccttgaaaagagggagaaaaattgtgaattaaggaagggaagagatggttggagaggaggtgggagaaggcagagataattgaaggagcaaaagcatctggagaagcaaagccactgaaagatgaacagggctctgaaagaaatgcttgattgctatcttttcaaatgactgcagttcccagtgacatcatttttctcctccctggaagtctgaggggcagttcacttatctcctcccctcccctactcctcaccccacactcaaaacctgtctatgctcctttcattctcatatgacagatttcagatggcattcttatttccctgatttctttttgagatagcttgcatttccctactctatataaagccaccgtttatcaaatgcctacatggaccaagcagtccacaagggcttcacagacagttttactaaactcatgccaaaactttcaggttttatagataaagatctataccttatagataaaggtatctataaggtatagataaaggtaaggtatctataccttatagataaagaaattgaagcttatagagtttaagtaatgttcccaaagcctcgtggctagtaattcaaacctaatttctgcctactccaaagtctatttttcctcatgatactatactgcctctccatggataaagacagagatcacatattaataaaatttgcacaaagtcggcaaattgttgaaagggaaggctaagatgattaataaaatcaagagccagatgatctcaacaacctgaaataactggctgacaaccaatttgaataactccctgcg

SEQ ID NO: 45386 - DNA, 9427 bp, Homo sapien
cgggcctgctggtggatgcctgtagtcccagctactcgggaggctaaggcaggagaatcgcttgaacccaggaggtggaggttgcagggagccgagatcgcaccactgcactccagcctgggtgacagggcgagattccgtctcaaaaaataaaataaaataaaataaaaaataaaagtttgatatattcagaatcagggaggtctgttgggtgcagttcatttgaaaaattcctcagcattttagtgatctgtatggtccctctatccgtcagggtcctagcaggaaattgttgcactctcaaaggattaagcagaaagagtttaatgaagggtctctttccagggttaagggaactgctagggtttggatatttgaccactccaaactcatgttgaaatgtgatccccattgttggaggtggggcctaatgggaggtgttttggtcctgagtgtggacctctcacgaatgtcttggtgccatccaagtgagttcttgctcgctctttttttctttttgagatgtagtttcactcttgctgcccaggttggaatgtagtggtgcgatcttggctcactgcaacatccacctcacgggttcaacccattctcctgtgtcagcctccagagtagctaggattacaggtacccaccactatgcccagctaatttttggtatttttagtagagacggggtttcaccatgttggccaggctggtctcaaactcctgacctcaggtgatccacctgcctcggcctcccaaagtgctgggattacaggcgtaagccaccgtgcctacctagttctagctctcttaattcccacaagagctggttgttaacaagagcctggtacaaacccctctctcttgccacgtgatctctgcacatgccagcttcccttccccttctgccatgagtggaaacagactaaagccctcaccagaagcaaatggtggcaccatgcttcttgcacaccttcagaactgtgaaccaaataaacctctcttctttaaaattattcagcctctggtattcctttataacaacacacacacacacacacacacacacacacacacacacacgcaaaagcagactaaaacaggaactaattagaaatggtaatgcaccgagggattggcaccgaggctccccaacaggaactgaggccatggatagaaggacacattcatgttatttttttctaatggttaagtaattatttgctcttactctcaaaatttctgccaaggcctcccatggaccaaactcaactaggatctaggaagcagagaacctgagtgttgcattcagcagaagtcagcttcctagggaatattgcaggaagggtgaaggtagagaatctggtggggaagcaagcaaatgcccatcacatgcactttcctccaacagagcgactcagatgctataaaacttgctaacgcagtctcagggtctgatcacagtaacatacaagccaggttttagtcatcagaaatcgcagtcctattgtcttctgcacagacccaaacacacttggaggtcatgttcaatatgaatacctcacagagaaggaaatttacacacgagaagtacatctgcagaaagccagctggcatgtcaaccattcgaaaactcagggtgttcgggataaagaagactcaggaagacaagtatgaagcataatctgtgacattattgatatcttcctgatatcaatattattgatatcttcctgaagaacataattcctgcctaccatcaacaagcatcaatactttctaccagctattctcaaccctcatcatcggaagagacagacactgactgtgtcaaagtattagtcccatcattcagcaattaactttagctcaatgcttcaaaaattcttcaggccctgtgtaatttcagctatgtacattaatgatgagtacccatacaaccattctgtttcttattttcagtaccatatttaataaatatcagttattcaatactttatttagacattttgttagattattttgaccaatgaagtctaatctaaatgttctgagcatgttcaaagtaagctaggctaacctataatttttggtgtgctaaatgcatttttaacttatgatattttcagtttacgggggtttgttgggacataacttcatcatacatcaaggagcatctgtatatgggatatagttaaagcagtgatcagaggaaaatctatagccttaacacatttattaataaaagtgtaggaattaaattatcagctgaaaaatgtaaaaagtatctaaaagagtaagcagaaagtacaagaaagaacccatagtagaaaaaagtgaaaattaataaaataagaagccaaaaaacagatcaaatcagtaaaccaaaaatcttgttctttaaacaaatcaacaaagttgacaaaaaattagatcttttaatcatgaataaaaaaagagaaagcacaaaaatgaataaggaatggtgagagaaataactattgataatcagcaaataaaaaatcattaaaaacaatgttgttcacatctatgaaaaacattgaaagctagagggaatgggtaattttccagaaaaatacaattcaccacaattgacttcaaaaaaaaaaaaaaaaagaagtacagcacttatgtgagcaatttccatagagaaatacagttgtcatggaattataacacacacacaaacactaggtttagatgttttcacagagaattccaccaaacctttagaaatcagatcatccaaaggcaaattaacaaccctcagccatttgaggcaaaatattacaattgaggcaagatatactgtactgaaaacttgaggaaaaagcaggagagaaagttcctttgggaaattcgaatactcaaaagtgcttacatacaatgaaaaatttggaaatccataagcatggccaaggtgggacacatgctcagaaaaggcctgagaagacactaataactcacctttagtaattcctaggctcacagcaagaaaaaatgaaggctaaggcagaattatatatggctccgctaagtgttgagggagccccaatacagagtcagtaagcaaagtctgggagatgtttttcatatttttttcttttttggctccttgcagtcaaggaaatcatttttaaatcactaaatgctaaatgaacacaagctaaaggaaccgagccgccttcaaacatcaaacataaaaaagaatgcagatattacaaaaccagtttacaaaagttactaaacaaataaaaactacatcccacagtgggtaacaaaaataaccttgaagaagggaaaaatttggtttccagaataaacacattataatatccaaaatgtccagttttcaacaaaaattaagaagcatgcaaataaacacaaaactatggcccatttacagaagaaataaatgagactctccctgagtaagcagatattggaaatattagacaaaaactttatataactgtcttaaataaacttaaagagctaaagaaacccaagagaatgacatataaataaataagaaatatgaattttttaaaaggtacaaaaaaattctgaggctgaaaagtacaataactaattaaaaagttactttttacttagggttccaatagaagatttgagcagctggaaaaaagaatcagtgaacttgatagatcaagtgaaatgattcagtctgaagagcaggaaaatgaaagaatgacaacaaaaaagaatagagcctaaagacctgtgtaacaacatcaagaatgcctacatacagaatcctggtggggagtgaggggcaggaagactatttgaagaaatgtgtttgaaagcttcccaaatttcactaaaaacaaatatatacattcaaaaagctcagtgcacttcatcaaggaaatatacaaagatattcacaccaagacacactatgtttcaaattgtcaaaaggcaaagcgaatgtttgaaagcagcaagagaaaggcaacgcgtcatttacaaaggatcctcaataagtttgacagcagatagtgcattataatccatggatgccagaagagcttaggaaaaaggcaatgcatcatttacaaaggattctcagtaagtttgacagcagagagctcattataaaccatgggtgccagaagagcttagaatgacattttaaagttctgaaagaaaaaaacactgtcaaccaaaaattctgtaacttggaagatgccccttcaagtattaaggataaattacacattcccagattaaaaaaaaaagagagagagaaagagaaagaaagaaagaagagagagaaagaaagggagagaaagaaaaagaaagaaagaaagaaagagaaagaaagaaagaaagaaagaaagaaagaaagaaagaaagaaagaaagaaagaaagaaagaaaaagaaagaaaagaaagaaagaaaagcaagcaagctttaaaagttcatgtttggtaggctgtacttcaagatacacttttaaaaaaaaagactccttcagatacaaactaaaaaacactagaaagtaactcaaaaccacataaagaaataactccagtaaagataactacataggtaaatataaaagcaattatcatattttttgtaagtctttttaaatattctatatgttttaaaacaaatgtgtaaaataatgactataaatctatgttaatgaagcatgatgtataaagatgtggtttgtgaaattaccaacataaagaaattcataggaaactaaataataatagagattttgtatactattgaagttgtttcaatttactctaaattgttccaaattaagaatgttaattgtaaatccccatggtaaccactaagttaatatcttttgaaaatacagaaaaggaaagcagagggtaaacacagtgatatgctacaaaatagcaactaaacacaaaagaaggcgataattgaggaaattaggaacaaaggaggtataagacatacagaaaacaaaagcaaaatggtaggagtaagcccctctttatcagtaattacattaaatacaaatgaattaaactctccaatccaaagaaagagattgacagaatggatttttaaaaaatgatccaactatattgtccacaagatactcactttagatcaaaatacacaatgagttgaaatgaaaggatgggagaaaatattccatgtaagtaataaccaaaggagatctgaggcaaatatacttatatcagacaaaatagactttaagtcaaaaactgttacaaaatacaaagaacagtatatattgatttcaaaattaaacaagaagatataacaattataaatatatgtacaccaactaacagggctccaaaatatataatgtaaccattgagagaattaaagggagagacagacaattccacgaaaattgttgggcattttaaaacccaactttaataaaggacaaaacacccagagcaaatatcaagggaggaattagaggatttgaataaaactataagcaataactatagataacacttctctcaaaaactgcagaatacacattcttctcaagtgaacatggaacattctccagcacagatgatatgttaggccataagataagctcaataaacttaaaaagattgaaatcatgcaaagtatcttcactgaccacaatggaatgaaataagatatcaataacaaaagaaaaactagaaaatttacaaatatttggaaattaaacaacacagtatttaccaaccaatgaatcaaagaacaaatcatgagggaaattagaaaatgtttagagacgattgaaaacaaagatataacaagatgggtgtgatatatcaaaagcagtgctcagagttgtaacacctacattttaaaaaagaaacatgtcaaatcaataaccaaactttactcaataaaccataaaaggaagagcaaacaaaatccagagctagcagaaggaaggaaataaagattagagcagagataaatgaaattgagaattaaaaaattatacagagatcaacaaaactaaaagttggttcttttaaaatatcaataaaattaatatacttttacatagactaagcaaaacatctctattcagctgacttttttttacaagggagccaacattattcagtggggaataatagctttttcaacaaaaagtgctgggaatactgaatattcatatgcaaaaaaaatgaagctggacccctacctcacattatatacaaaatctagattggatcaataatgtaaatatacgagtgaaaaccatacatgcttagaagaaaacatggaaataaaacattgctgtggattggcaatgcattcttagataatacaacaaaaatacaagcatgaaacaaacaaatgtagccaaaatgtaccagaatctgaaaacatgtattatctataaagaattagaggggaatttggtgaaagaaatatgggagaatgggatattgctctgtgaatgcttttgtgcataattgtacatttttaattaagttaatcttttacactctcaaagtgtgatattaagcaagcaaagataagttattacaagactctaaaaccgaatgcaatgagaaacaagtgaatccaaatatatttcaaatgaatgaatgacataatcaaacttaaggggaaaataataattaatctgattaatttttgactgttctcttatttcaaattgacttttgaacatactttgactacatactattgcttgaaaaaataaaatatctgcaaaaaattattaaatcttcatgataggattttttctttttatattagtataaatataacaattctgaaacaaatgtatgtgcattgtaagattaagccaatgagtaaatattaatatatttgtattgctagaaccccagattctcactgtgaaaggacagagatacagatatggaataagacaaggaaagaagcagcccactgagttacattagaatcagtattatcaacataaatatacaatgtgctctctcacatgctctttccttctcttaaaaaatatataatatgtacatattatatattatatgcatagacacacgtgtgtctatacatatcctacatgtacatattgaggattaacaggtgctagtagaaaatattaactttctttgtattaacaggtgttagtagaaagtagtagtaggtgctaagataaaagccataattaaacctcctggtgaatgaacacaccatcacctacaatcttaccaaaaatagaaccaagcacgtgtcctagtcaaacctctggattcaactgtcatttggataaaacgcaaaggatagtgaaaatgtcgatcttcactgagagtctaaccagcaaaattcacagtgtggacaccaagtgacaaaaatcccaaatttttcaacaaatatattgtatgggaaagaaaactttgaaaagaaacctgtatgttagaagggattttaaaaacacgacaaatgaaaacaaatgggcaagactaaatcatagtgtcttggaatgcatgcaggaaggacacagccgtgaaaatgcaaggacgcctctactggaacagtcacgtttatcgtcacttttcaggagaaaggtggctgcaactgaggagagtcacatgcttcagggctggcaaagtcctatatcttgacttatgtgatgattacagggatgtttacaaaaatcaaactataagtttgttttgtgccatgttttgtattgtgtgtgtgtgtgttttgtttttcaacttaaaaataaataaaatcaaaaccaaggcttcattatcaagtagcacaaagtctccaatctataacctcctttgtctggatatctgcatttaactaccattgccagagctaatcctgacaatgcattcatatttttaacactgaaacacagtaaacagggaaaattttgctcctctaaaacagggcatcttcaggcaatcagaacaactcagaaagtttctgtctgttgcataaaactcccctgtgcaaagagttacacaaaatgctgtcatagtaaaggtagttaactaacggcactaattgttcttgggcagtggccaagtggaacttcagagacctggcattgccagccagaaatcacttgtcatgggaattgtctcctggaatcactttggttgtcccagggtaacgcagggaaagtggttaatgggtcacttgggggtggcatcttcatcagtaaatcacatttactttctcctactaagaattttatttttggccatgaagccaaaagtcagctcttaaataacaagggaagcaaataatcattgaataaaaatagcaggaagaaaaagctgtgcaaagaaatttatgtttttaatttgttatatatgtatatttttatcatactttaagttctagggtacatgtgcacaatgtgcaggaataaaatttatgtttttaaaatttattctacattatgaattctacattagaaaaataaaccatagcctcatcacaggcacttaaatacactgaagctgccaaaacaatctatcgttttgcctacgtacttatcaacttcctcatagcaaactgggagaaaaaagcaatggaatgaataaaatgatagccacaaaaatcaaggtgggagaaatacttattatatgtccataaaaaattttaattaatgcaaagtattaacaccaatgattgcagtaatacagatcttacaaatgatagttttagtctgaacaggactatccaaaagttaattttctatagtaacagtttttaaataaaatatcaattcctgaaacacataaaatggtccatgagtatacaacgagtgaaaaaaaacaaattcagagcaaagataaattaagaagtatctaatattcaaacatagtcaaagagagggagatttctggataatcacttaaacccatggttaaacataaatgcacatatgttaatgtttactgaataacttatctgtgccaagtggtgtattaatgattcatttttatttttcactaaatcttttctctaaagttggtgtagcctgcaactaaatgcaagaaatctgacctaggacctgcacttcttaccattttgctcatatttattccctgtgcatttttgtaacatgtatatgttatatatatagaaagagagagaggcagagatggaaagtaatttatggagtttgatgttatgtcagggtaattacatgattatataattaacaggtttctttttaaatcagctatatcaatagaaaaataaatgtaggaatcaagagactcattctgtccatctgtgatagttccatcatgatactgcattgtcaagtcattgctccaaaaatatggtttagctcaacactgagtgactataggaaaccagaaaccaggctgggcg

SEQ ID NO: 45387 - DNA, 8876 bp, Homo sapien
gtgtttggttttttgttcttgagatagatgatgctttaaattgaccactctagctgcattgtgggaggaaaaaagattttagaacaagactagaaacagaataattagaaaaatgcaactacaatgcagatgagtgattatcaaggtctgaactgaatagtggaaatagagataaggaggcaaattcaagatatgtgcgtgacagtaaaattaacatgacctggtgtttgattgactctgtaaagtgaaaggaaaggatgaataatcaacaaataatatttattctaccaaatgcctccatgccgctttgatgacaggataatatgtaagcttttctatatttcagaaactatatgacatgacgaaaagtaaaaaggggatgggggtaaggaggtatcctgaattgactgagaaataaggaggtattccacagagaatataaaaaaacatatacttagtgttcaaggaataataaaaaagagaacatctatgtgtccaccatacaggatatgaaatagaacatttgccggccatggtggctcacacctgtaatcccagtactttgggaggccgaggtgggaggatcacttaagcccaggacacaggttgcagtgagccaagatcacactattgtactccagcctgggccaccatgtctcagaaaaataaaaaaactagatgtcttggaggattggaaacaaaatagaactttactagtgccttagacgcccattgggtgctccttgccaattgtgttctcctttatttcctgctggatatgaccactgtccttccattgcattgtatgtgttttttaatagactttaatggttctcaagtgatgcattatttagtttggttctttgaaacttatataaatgaaattattttgtagaagttctttcacctttatcagaaggtactttcaccttgattcaataataagtttgcatattacaaccttgttgaatgttggtgtaattcatccattcgtattgctatatgatattccactacatgaatatgtcggacttcattcctcagatctattgttgatgaacacttgaaatttttccagtttttaactattacaaacaatgctgctatgaacattcttttgtaaatcacctggttcatatgtgcaagatatcctctggggtatatatttaaaagtaaaattattgagttattcaacattaccatgaaatgctacactattttttttaacaatcctaccaatttacacttctaccacgaacagataagcattaccattggtcttcatttgtaggaaccatatttgtcttttgctctgggggctttgttttgttttgctttgttttttgcttagaagtgctttggctattagggatctttttttggctccatgtgaactttaggatttttttttaattttgtgagaaataacgttggtaatttgatgggaattgcattaactctatagattgtatgggtgatatggtcactttagctattgatttttctaatccgtgagcatgggatgtttttccatttgtttatgtcatctataatttctttcattagtattttgtagttctccttgtagagatctttcatttatatagttatgcattcctaggtatttttcatggctattgtaaattcagttgagttcttaatttggttctcaacaaattaatctcaacaaacattcaaacagcttgaatgtatttggtgtatagaaatacaactgatttttgtggcttgtttatcccaagactttactgaagtcgtgtatcaagtctaggagtcttctgaagactttagggttttctaggcctacagtcatgtcatcagtgagcagagatcatttgacttcttttctaatttgtataccttttatttctttctcctttctgatagttctggctagcacttccagtactgtattgaataggaatgatgaaggtgaacatccttgcttttttccagtttctagaagcaacacttctaacttttgcccatccaggatgatgttggctgtggctttgtcatagatgactcattttttgaggtatactccatctatacctatattgttgagggtttttatcataaacagatgttggattttatcaaatgcttattctgcatctaatgagatgatcatagggtttttgttctcagttccatttatgtggtgaatcatgtttattgatttgtctattttgaaccattcaagcacccctggaataaagcccacttgatcatgatgaattatctttttgatgtgttgttagcttcagtttgctagaattttgttgagtatttttacatctgtgttgatcagggataaggatttgtagttttcttttgtgttctttttaaaattttccttgttaattttactgcacagtattattttaatgatgaataaagtgttgagctggacatgtgtaccttgttcctcatgttacaatgaaactgtttaatatgtcatgattatttataatgttgagagtagtttttgtgtatatattaagatatttacatcagttctcttctattcctagtttgttattattacaaatagtttcaaatgtgaacaagtgcttttcccacagctattgaaataaccatattttgttcttttattcagttaatgtggttaatttcattgtttggttttctaattttaaaccatacattcttgaaattactgcacttagtcacgatgtatttttctttggagtatattgttggattatatttgcaaacatttttgtttagaattattatgtagtatattagtctgtaatttcatttcttttaatatccctgtatggttttactatcatggaggtaccaccatataaaacaagttggaaagtgttatgtcttcccaattctctaaaaatattcatgtaacattggcattatttctttattaaatatttggtaatatttctttattaaatattgcatccacctagccctggagttctttctacaggaaaaaaaaattttctaaataaaatttctacaatgaaaaaaaaactactcagtttttctagtttttttctgatcatttcataaaagtaggtatttttcataggaacttgaccattccttatgattgtcaaatttattaatataaagtttcatattttatatttattttatcagataaataaaattatatgttttgaaatatatattcattgtaaaatagccatgttaagctaacatatgcattaccttacatgcttatctttttttatgagaacacttaaaaatctactcttagcaattttgaagaatacaagtacatcccctatggagaacagtttgaaggctcctcaaaaaagtaaaaatagagctaccatgtggtccagcaatcccactgctgcatatataccccccaaaaaagaaatcagtatatcgaagagatatctgcactcccgtatttgttgcagcactatttacaatagcgaagttatggagtcaacctaagtgtccatcaacagatgaatgaataaagaaaatgtggtacttatatacaatgaagtattattcagccataaaaaggaatgagaccctgtcatttgcaacaacatagatgaaactggaggtcattatgttaagtgaaataagccaggcacaaaaagacaaatactatgtgttatcacttatatgtggaatccaaaaagcaaacaactgaactcatggagatagagagtagaaggaagtataccagaggctgtgaagggtagtgggggttgggagaggtgggggatggttaatgggtacaaaaaaagaaagatttaataagacctagtatttgatagcacaacagggggattgcagtctaaaattcaattatacatttaaaaataactgaaagagtataattggattgtttataacacaaataataaatgcttgaggggatgaatatccaattttccattatgtacttattgtacattgcatgcctgtaccaaaatatttcatgtacctcataaatgtatacacctgctatgtacccacaaaaattaaatttaaaaacaatacattgttatccactatagtcaccatattgcacaatagatctgttgaattcattcctcctgtacaatgcaattttgtaccctttgaccaacatctacccaatcctcctggtaaccatcattctactctgtacttctatgtgttcagccttcttagacctccacatacaagtgagattatgcagtatctggctttctgtgcctggattattttactcagtataatgtcctcccggttcattcatgttgtcacaaatgatactttttttattttttaaggttgtatactattctattgtgtatgtgtaccacattttcttcatccactcatgtgtcgatggatacttaagttaattccacatcttggctgttgtgaataatgctacaataaatatgggagtacagataactcattgacacactgatttgatatctttttaatatatgcccagaaatagcattactgaatcatatggtaattctatttttacagaatcatttatactgtcttttacaatggctgaaatagtttacattctcaacaattacaaggttttccttttctccacatcctctccaacacttggtatcgtctgccttttctgtaacagccattctaacggatgtgaaatggcattttattgtagttttaatatgcatttctctgatgatcagtgataattagcatttttatatatctgttggccatttgtatgtcttcttttgagaaatgtctatttagatcctttgtcaatttttcattagggttccttgttttcttattattgtgttgtttgagttcctaagatattttggacattagcctcttatcaaatgtatagtttgcagataatttctcccattttgtaggttatcacttcactctgttgactttcttttgctgtgcagaagctttttaggttgatgctattccatttgtgttttgttgcttttcttgcctgtgctttagagtcatatcataaaatattattgcccagaccaatgtcttggagttattcccctgttttcttctaggagttctatagtgctaggtcttacatttaagtctaacttattttgagtttatatttttatatggtatgaaataagggcctaatatcaatcttgtggacattcagttttctcaacaccattttttgaagagactgttctttccccatgtgtgttcctggcacctttgttgaaagtcaattgactataatatgtagatttatttatgggctctttattctgtgtaattggtctatgtgtctgcgtttatgccagtaccatggtgtttcgattgctatagctatgtagtataatttgaagtcaggtaatgtgatatctcctgccttgctttttttgatcaagattattttggcttttcagagttttttgtgattccatacagatttgagagttgtttttctatttctgtgggaaaatgtcataggaattttgatagagattgcattcaatatgtacatcactttggatagtatggacatttcaaacatattactttttccaatccatgaacatgagatatctttccatttatttgtggcttcttcaatcgctttcatcaatgttttgtagttttcagtgtaaagatcattcacctctttgtttaaatttacatctaagtattttttgttgctattataaataggattgttttcttgatttctttttttgtatagtttgttgttgatgtgtagaaatgctactgaattttgtatgttcacattgtatcctgcaactttactaaattcatttatgaattctaaattttttggcagagttattggtgttttctatatataagatcatgtcaactgcaaacagaaacaatttaacttcttcctttccaattttcatgccttttatttctttcttttgcctaattgctctggctaggacatccagtactatgttgaatagaagttctgagagtgggcacccttgtatgaagtttcccacaacatctcttatctttttattagctatatattaatacggatgtttcttcttcatcaggagtttgaaaaatatgtcttttctctatattgttcttaatcagtcttcctagaagtatttcaatttcaaaaagtagcaacaactgtgggagttcagtcaggctggtgggaaaaattttaaagatagttttaagaaatcgacacaaaccttcatggaaggctgggggtgttgtatagcttcagtaatagatctgaatgaaggcggcctaatccttccttgagtaaacagcttaaagtaggtgcaaaggaatgtaagggagtttatctaaataacttgtttactcatgtggtcctgaagccaacctttgatcattcacaggcaggatggctctctctcgggggagggtgaccaggttaattaccctctatttgtgttgactaaaagcccctgtcatttaatgttttttcaataaatgctggcagggctagctagtcagggctcgtggctgccagaactctttctgtgcacggcccagccccctagcggctctttcactgaataattggtgtctgagtacattattcatccctcgtgcagctggggtctgcaggacagacccccacaaacaacaatttgcaaaagcaaacttccctgttttgttttttttcccgagatgataaattagaggcttttagtgtgcctcggccacttagaaatagcaagagagtgcacaaaggtcaactctgtgagctctacgtcaagaaggaaaatgggaatccaccagaatcatgaaggacatcatagatcccaagaaggagaatgtgagcaaacagtcaacatgacagcaaccagcttataaaagtgagcgaagtcctagtatgtgagagaggcagagagcctccctctgtaactgacattttcactgtgaatctgagcaaccccagccaagttgttgcattttgtttctcccaaggcctggagtcaacatggggagaggcttggagatgctgtgaagcaaagacactgggaacagctgcagacattttcccagaccaggaagtaagagcaagatgccattttcaatctggatgcatgcaaagtcagctttttttttttctttttgtgacccagcagaatgcctgcacaggcattttagtctcaggccaaagattggaacaactgctttggggcttggtagggaccttcacagccatattgtgggaaacacctcagcagtatgtgctggaattgtgctttcccccatcgcagcctcggggcaacagaaaagctgctacagctgtaatttctcccaggtgatgaaacttgcagccagggccagcttggagacctacaaccagtctgcaggtgtcattgctgggtgccccagcctgttcccctgagaatgtgatacagcagggctttctctgcttcacccccaggcagaaattcaggcattggagcacctgtctacctggaccagcatcctgagctaccccaccgtttgtaaacataggttgtggtgcagtggggccctctccagtctatggccaggcagatttccaggtatgtggagtacccacttgactggatcagcagcctgagcttccccaaccttcctgtgctgagattatagtgcagtgaggccctctcatctccacacataggcagacctccaagcaattagagcacctgctcctatggagaacttaaatttacaagaaaaaaaaaaccatcaaaaattggccaaaggacatgaacagacaatcctcaaaagaagacatggatgtggccaacaaacatatgaaaaaaagctcaaatcactgatcattagagaaatgcaactcaaaaccacaatgagatactatctcaaaccagtcttaatggtgattatcaaaaactccagaaacaacagttgctggtaaggctgtggagaaataggaatgtttctacactgtttgtgggaatgtaaattagttcattcactgtggaaggcagtgtgaaaattcctcaaagatctagaaccagaaatgccatttgccccagcaatccctttactggatatatgcccaaaggaatataaatcactctattataaagatacatgcacagggctgggtgcagtggctcacacctgtaatcccagcactttgggaggccaaggcgggtggatcacctgaggacaggagtttgagaccagcctagccaacatggggaaactccatctctactaaaaatacaaaaattagccaggtatagtggtgcacacctgtaataccagctactttggaggctgaggcaggagaatcgctggaacccaggaggcagaggtcaaagtgagccaagatcataccattgcactccagcctgggcaacaagagcaaaactccatctcaaaaaaatatatatatacatatacatacatatatatacatatatatacacatatatatatacatatatacatatattatataggtaaatgtatatatatgtgtatatatatacacacatatatatacacatatatatacatattataactacatatatatacacacacacatacatatacatgcacacatatgtttattgcagcactatttatgatagaaaatacatggaatcaacccaaatgcccatcaatgatatattggataaagaaaatgtgatatatattcaccatggaatactatgcagccgttaaaataaatgagatcacgttctttgcagggacatggatgaagctggaagccatcaccctcagcaaactaacacaggaacagaaaaccaaacaccacatgttctcagtcgtaagagggagttgaacaatgagagcaaaca

SEQ ID NO: 45388 - DNA, 4860 bp, Homo sapien
cgtgggtacatggaggggaacaacacacaccagggcctctcagggggacaggggtaggagaccatcaggacaaatagctaatgcatgcagggcctcatacctaggtgatgggttgatgggtgcagcaaaccaccatggcacacatttacctatgtatcaaacctacactttctgcacgtgtatcccagaacataaaataaaatttaaaaaatatatacactgattcatgatctcctttctctccttctgaaacactctttaaaactttttagcatttccccctctgtcttccatgtctcctaactacatgtttcttattttccatttccttattcctgtgttcattttggatagccccttctgacctatattacagtttactagttcactcttcaactgcttctaacatactaatattctgttaaaaccattcatttgggtttaaatttcaattatgttattctctatggacattctatttgttttcttttaatcttcttggccattctctagagtttcctgttccattatgatatttttaattttttgttttactttaaacatactaaatatagttattttattttctgtatctgatactttcaataactgcagtcttcgctagtcttttttctgtgctcttgctcatagtttttttcgtttgttttcatgattagaaaaacagagagagaagaaggagagtaaagggaggaggaggaggaggagaaaagaagaaagcagagaagaagggacagagaaaaaaaggaagttggttctaacgtttctctaacaactgtcttcagtgaaacgctcccaccttgtggatttttaggttattgaaattaaccagtcttctgggtgcagcacaccaacatggcacatgtatacatatgtaacaaacctgcactttgtgcacatgtaccctaaaacttaaagtataataaaaaataaaataaaaagctacacaaattaaaaaaaaaagaaatcaacctaattcctagattaccacctcttgattcaaatgctttaaatctaggcttttcatctgagtctttctttttagttattctgtttatcttcaaaacactcctgctttgaatcattcaaaatctacctccctccctctgtttgactaccatcaatttttttgctcattcctaatgcattaatctattagctgtgaatatccaaaaaccctcatttcactgaatctttgacagacccctttgcatcctcttgttcttctaattatttcctcagacactttatgttctcttttctttacaagcatgccatagtttatatacaatgtgtgtattgtttttatatatacctatatatagcctctttttaaaagcactgtacaccatgctttgaaatatattctaaaatcaggtagcatgaaaatggaaacataacatactaaaacatatgggatgcaacaaaagcagttataagagggacacttatagcaataaatgcctacatcaaaaaagaaaaaaagatctcaaataagcaacctaatattatgcctaaaggagcgagaaaattagagaacaatacaagcccaaagatagcagaaggaaacaaataacaaagatcagagcagaaataatataatagaaactgaaaatttcaataaaaataagaattgttttttgaaaagataaacaaaattaacaaattcttacatagactaagaaaaaagaaaacaaactcagaaatgaaagaagagacattaaaactgataccacagaagttaaaaaatcataacatactactataattaattattcaccagcaaattagataacctagaagaaattgataaactcgtaccaaaactgaatcatgaagaattcaaaatttagaacaaatcgtgaataaggaaattaaatcaccaatgaaaggtctctcataaaagaaagacccaggattgaatggctcagtggctggattctaacaaacacttagataactaacaccaatccttctcaaacgcttccagaaacatgaagaagaggaatacttccaaattcatttttcaaaaccagcattaccctgataccaaaaccagagaaggacactataataaaaataaattgcagaccaatactcctgatgaacttagatggaaaaaccctcagccaaatattagcaaatattatttttaagaaaacacagcaaaaaaattcaccatgcttaagtgggattcatccctgggaagcttattagtcttatttgattcgtgtaatcagaaaatttctatgtctagtgaagagaaatgagagcaatagagactcatagcacctcaacaaatttccaggcttgagccagttaacaaatacaagtccttcaaatacaaaaagactgtgaaagaaaatagaacagatcaatgaaactaagaatttgttctttgaaaagataaacaaaactgacaaaccattagctagactagaaaaacgagagaatactcaaagcaataaaatcagaaatgaaagaggaaatattgcaactaataccacagaaatatagaggatcataagaggccactataaacaattacaagccaacaaattggataacctagaaaaagcagataaatttctagaaaaatgcaacttacctagagaaagtcaagaagaaagataaaatctgaacagaacaatactgagtatggagagtatatcaataataaaacatctcccatcaaagaacatcccaggaccagaaaacttcattgctgaattctaacattttaaaaaataataatacaatccttctgaaattcttccaaaaacttgaaggagaaagagtatttccaaactcattttaaaagatcagcattattgttttttttttaaagtgatgttccccttcctgtgtccatgtgttctcattgtccaattcccacctatgagtgagaacatgcactgtttggttttttgtccttgtgatagtttgctgagaatgatggtttccagcttcatccatgtccctacaaaggacatgaactcatcattttttatggctgcatagtattccatggtgtatatgtgccacattttcttaatccagtctatcattgttggacatttggattggttccaagtctttgctattgtgaatagtgctgcaataaacatacgtgtgcatgtgtctttatagcagcatgatttataatcctttgggtatatacccagtaatgggatggctgggtcaaatggtatttctagttctagatccctaagaaatcgccacactgacttccacaatggttgaactagtttacagtcccaccaacagtgtaaaaatgttcctatttctccacatcctctccagcacctgttgtttcctgactttttaatgatggccattctaactggtgtgagatggtatctcattgtggttttgatttgcacttctctgatggccagtgatgatgagcattttttcatgtgttttttggctgcatagatgtcttcttttgagaagtgtctgttcatatcctttgcccactttttgatggggttgtttgtttttttcttgtaaatttgtttgggttcattgtagattccagatattagcactggggcctgttgtggggtggggggaggggggagggatagcattaggagatacacctaatgttaaatgatgagttaatgggtgcagcacaccagcatggcacatgtatacatatgtaactaacctgcacgttgtgcacatgtaccctaaaacttaaagtataatttaaaaaataaataaataaaaataaaaataaaaaggcaaacaaggacactataagaaaagtatgggccaaccaatatccctgatgaacatagatacaaaagtcctcaaaataagtactagcaaacagaatttaacaacatattaggagaacatttaccatgataaagtggatttatcctccagatgtttcagcaaacacaaatcaaatgtgataaaccacattaacagaatgaaggataaaaaaatagctatctctatatatgcagaaaaagcatttgactaaattcaaaatcctctcatgacaaaacctctcaacaaattgggcgtagaaggcatgtaccttaacacaaaacaggacatatataacaagctcacagctcacatcatacccaacaatgaaaaagtgaaatcttttctgctaagatcaagaacaagacaaggatatttattctcactacttctattcaacttatttctggaagtcctagccagagcaattaagccaaataaagaaataaaagatattcaaattgaaaaggaagaagtaaaattgtctctgtttgatgacatattatatataggaaaccctaaaaactccaccaaaaagctattagaaatgataaatgaattcaataaaattgcagaattcaaaatcaatgtacaaaactcagtagtttctttacactcacaacaaactatatgacaaaaataaagaaatcaatctcattcacagtagcatcaaaaaaactgtattttttttgtttaggagcacatttaggattgtacttaggagtacatttaaccaaggaggtgaaagatctgtattctgaacactataaaacattgatgaaaaattgtagatgacacaaatacatggaaagatattttatgttcatgggtaggaagaattaatattcttaaaatgtccttactgcccaaagcgatttataggtttaatgcaacatttatcaaaatttcaatgtcattcttcacagaaatagaaaaaacaatttgaaaatttatatggaaccacaaaggaccctgaataactaaagcactcttgagcaataagaacaaagctgaaggcctcacaatctgacttcaaaa

SEQ ID NO: 45389 - DNA, 1235 bp, Homo sapien
ctgggtcggaggagcaggagtatggagggaagactcctgggtggcatggagctcttgcacctctaggcactgcccagccctgtgtcagccagggctgaacccccacaggataaggaagcctgtgtgtgtaccaacaatcaaagctacatctgtgacacaacaggacactgctatgggcagtctcagtgttgtaactactactatgaacattggtggttctggctcgcgtggaccatcaccatcatcctgagctgctgctgtgtctgccaccacagccaagccagccctcaagtccagcagtagcaacatgaaatcaacctgcctgcctatccagaagcccgcaattactcagtgctaccattttatttcaccaaactatttattaccttcttatgaggaagtggtgaactaacctccacctgtttccctccctgtctgtccattgtggatgagctctgagccctgttttcctgtgaagattctttgaattgcggccattctattcacatgaactctcacatctggagcacagatggccctctcaaggtaatttattgtatgcattgactgtttaccaaacaaatgtcttactatgtactcaggtatattcagcagcattgtcgactgcagtcccctatgcttgccagaagatactgtattcaaagtagaagtttcacagtgatgagtaatcactgcaattttcccattgctccatggactctcagaggccggtgttctgttccctgtaaatagagatgtactctgaacctttctgcctccctcagctgttcctagtccttggtatcagcccctggagatgtccacaaccacttaggacaaaaggcaaaagtggaatttcagacaaaactttgataggatcttcagtgataaacttggactaactgtggcccaggtatcagcactcccaagaattgccaggaggaagctttggcagacaccacaggtatggcaaggcctatctccctctgctgaatccaacaggggcaagcaagctggcatgtggcttgaggtgacccgaatatgtcagcacccctcagatgtctttctttgcacttttaaaaaaaatctcagaatttgctggcaacatggccaaataggaacagctccagtctgcagctcccagtgagatcaatgcagaatgcaggtgatttctgcatttccaactgaggtacctggttcatctcactgggactggttggacagtgggtgcagcg

SEQ ID NO: 45390 - DNA, 5638 bp, Homo sapien
ggaggggcttccacattgccaaggcttgagtaggcagttttacccccacagtgtaaacaaagccaccagaaagtttgaactgggtggagcccaccacaactcagcaaggccacagcagccagactgcctctctagatttctcctctctgggcaaggcatctctgaaaaaagggcagcagccccagtcagagacctatagataaaacccccatctccctggaacagaccacctaggggaaagggcgcctgtgggcacagcttcagcagacttaaagcatctttgaaaagcctgatggctctgaagagagcagcagatctccctgcacagtattcgagctctgataagggtcagactgcctcctcaagtgggtccctaacccccgtgtatcctgactgggagacacctcccagtaggtgccaacaggcacctcatacaggagagctctggctggcatctggtgggtgcccctcttggacaaaacttccagaggaagaaacaggcagcaatctttgctgttctccagcctccgctggtgatgcccaggcaaacagggtctagagtagacctagggcaaacaccaacagacctgcagcagaggggcctgactgttagaaggaaaactaacaaacaaaaaggaatagcatcaacatcaacaaaaaggacagccactcagtgacctcatcagaaggttaccaacatcagaaaccacaggtagataaatccatgaagatggagagaaaccagagcaaaaaggctgaaaattccaaaaaccagaacgcctcttctcctccaaaggatcacaactcctcaccagcaagggaacaaaagaaaactggatggagaatgagtttgatgaattgagagaagtaggtttcagaaggtaggtaataacaaactcctccaagctaaaggagcatgtcctaacccaatgtaaggaagctaaggacctggaaaaaaggctagaccaattgctaactagaataaccagtttagagaagaacataaatgacctgatggagctgaaaaacatgccatgagaacttcatgcagcatgcacaaggatcaagcactgattcgatcaagcggaagaaagatatcagagactgaatatcaacttaatgaaataaatcaagaagacaagattagagaaaaaagaatgaaaagaaatgaacaaagcctccaagaaatatgggactatgtgaaacgaccaaatctacatttgattgctgtacctgaaagtgatggggagaatggaaccaagttagaaaacactcttcaggatattatccaggagaacttccctaacctagcaaggcaggccaatattcaaattcagaaatacggagaacatcacaaagacactcctcaagaaaagcaaccccaagacacatagtcatcagattgagcaaggttgaaatgaaggaaaaaatgttaagggcagccagagagaaaggtcaggttacccacaaagggaagcccatcagactaacagcagatctatcagcagaaattctacaagccagaagagaatgggggccaatattcaacattcttaaagaaaagaattttccacccaggatttcatatccagccaaactaagcttcataagtgaaggagaaataaaatctttacagacaagcaaatgctgagagattttgtcaccaccaggcctgccttaaaggagctcctgaaggaagcactaaacatggaaaggaacaactggtatcagccactgcaaaaacataccaaattgtaaagacaattgacactatgaagaaactgcattaactaacagcaaaataaccagctagcatcgtaatgacaggatcaaattcacacataacaatatcaaccttaaatgtaaatgggctaaatgctccaattaaaaaacacagactggcaaattggctaaagagtcaagacccatcagtgttctgtattcaggagacccatctcacgtgcaaagacacaaataggctcaaaataaagggatggaggaatacttaccaagcaaatggaaggcaaaaaaaagcaggggtcgcaatcctagtctctgataaaacagactttaaaccaacaaagatcaaaagagacaaataagggcattgcataatggtaaaaggatcaatgcaacaagaagagctaattatcctaaatatatatgcacccaatacaggagcacccagatgcataaagtaagctcttagagacttaaaaagagacttagaccctcacacaataatagtgggagactttaacatcccactgtcaatactagacagatcaacgaaacagaaagttaacaaggatatccaggacttgaactcagctctggaccaagtggatccaatagacagctacagaactctccaccccaaatcaacagaatatacattcttctcagcaccacattgcacttattctaaaattgaccacatatttggaagtaaaacactcctcagcaaatgcaaaaaaaaatgggaatcataacagtctctcagatcgcagtgcaattaaattagaactcaggattaagaaactgactcaaacccacacaactacatgtaaactgaacaacctgctcctgaacaactactgggtaaataaagatattaaggcagaaataaataagttatttgaaaccaatgagaacaaagacataacataccagaatctctggtacacaattatagcagtgtgtagagggaaatttatagcactaaatgcccacaagagaaagcaggaaagatctaaaattgacaccctaacatctcaattagaagaactcaagaggcaggagcatacaaaaagctagcagaggacaataaataactaagatcagagcagaactgaaggagatagagacacaaaaaaaccttcaaaaaaaatcaatgaatccaggagctggttttttgaaaatatcaataaaatagatagaccactagccagactcataaagaagaaaacagagaagaatcaaacagatgcaataaaaaatgataaaggagataccaccactgatcccacagaaatacaaactactatcagagaatactataaacacctctacacaaactagaaaatctagaagaaatggacaaattcctggacacatacaccctcccaagactaaaccaggaagaagttgaatccctgaatagaccaataacaaggtctgaaattgtggcagaattaatagcctaccaaccaaaaaacagtccaggaccagatggattcacagccgaattctaccagaggtacaaagaggagctggtaccattccttctgaaactattccaaacaacagaaaaagagggaatcctccctaactcattttatgaggccagaataattctggtaccaaaatttggcagagacacaacaaaaaaaaagaaaatttcaagccaatatccctgatgaacatcgatgcaaaaatcctcaataaaatactggcaaaccaaatccagcagcatatcaaaagcttgtccaccacaatcaagtcagcttcatccctgggatacaaggctagttcaacatacgcaaatcaataaacataattcatcatataaatagaaccaatggcaaaaaccacatgcttctctcaatagatgcagaaaaggccttcgaaaaaattcaacagcccttcatgctaaaaactctcaataaactaggtactgatggaacatatctcaaaataataatacctatttatgaaaaacccacagccaatactgaatggtgaaaaactggaagcattccctttgaaaaccagcacaagacaaggatgccctatctcaccactcctattcaacgtagtattggaagttctggccagggcaatcaggcaagagaaagaaattgtctctgtttgcagatgacatgattgtgtatttagaaaaccccatggtctcagcccaaaatcttcttaagctaataagcaacttcagaaaagtctcaggatacaaaatcaatgtgcaaaaatcaagcattcctatatgcaaaaaacagacaaacagagagccaaatcatgagtgaactctcccattcacaattgctactaagagaataaaatacctaggaatccaacttacaagggatgtgaaggacctcttcaaggagaactacaaaccactgctcaaggaaataagagaggacacaaacaaatggaaaaacattccatgctcatggataggaagaatcaatatcatgaaaatggacatactgcccaaagtttttatagactcaatgctatccccatcaagctaccactgactttgttcacagaattggaaaaaactactttaaatttcatatggaaccaaaaatgagcccgcagagctaggacagtcctaagcaagtagaacaaatctggaggcatcacgctgtctgacttcgaactatactacaagtcttcagtaaccaaaacagcatggtactggtaccaaaacagatatgtagaccaatggaacagaacagaggcctcagaaataacaccacacatctacaactatctgatctttgacaaacctgacaaaaacaagcaatggggaaacgattccctttttaataaatggtgttgggaaaaccggctagccatatgcagaaaactgaaactggatccctttcttacactttacacaaaaattaactcacgatgtattaaagacttaaacataagatctaaaaccataaaaaaccctagaagaaaacctaggcaataccattcagtacataggcatggacaaaaacttcatgactaaaacaccaaaagcaatggcaacaaaagccaaaattgacaaatgggatctaattaaactaaagagctcctgcacagcaaaagaaactatcatcagagtgaacaggcaacctacagaatgggtgaaaatttttgcaatctatccatctgacaaagggctaatatccagaatctacaaagaacttaaacaatttacaagaaaataacaaacaaacccatcagtgggtgaaggatatgaactgacatttctctaaagaagacatttatgcagccaacaaacatatgaaaaaaagctcatcatcactggtcatcagagaaatgcatatcaataccacaatgagataccatctcacgccagatagaatggcgatcattaaaaagtcaggaaacaacagatgctggaaaggatgtggagaaataagaatgcttttacactgttggtgggagtgtaaattagttcaaccattgtggaagacagtgtggtgattcctcaaggttctagaactagaaatatgatttgacccagtaattgcattactgggtatatatccaaaggattataaatcattctactataaagacacatgcacacatatgtttattgtggcactgttcacaatagcaaagacttggaaccaaccaaaatgcccattcagtgatagactgcataaagaaaatgtggcatatatacaccatggaatactatgcagccataaagaaggatgagttcatatccttttcagggacatggattaagctggaaaccatcattctcagcaaactaatccaagaacagaaaaccaaacacccgatgttctcactcataaatgagagttgaacaatgagaacacatggacagagggaggggaacacaacacac

SEQ ID NO: 45391 - DNA, 4079 bp, Homo sapien
cgtgtatacctatgtaacaatcctgcatgttctgcatatgtaccccagaacttaaaatataatttaaaaaaaaatctcaaacaactcactgaagtgtctcaaagctgaacaagttttaccaaaatgaatccttctcagttaactgatcaaatggatgaatcctgaccctctgaagtctctttcctgagttagagcagggaactgctctgagtgttaactgttggattcactgcagtgtcctacaatattttacaagaagatgaacaggcaacctgcagacctaagcttgattcccaagtcacagtctgacccctgctacaggaggttaccctcctcaggaagagatagaaatagggaatttgaaggaatagtgaggggaccagggagatttgattgagtctggtttccaggtgaattaaaaggaagggtgtcatccagggtttgttactacagtcaaaagaataaataaatcaatgaagaaataccttcattgtctgtggttttcatgcagatatactcatggaggttgtatctctccaaaaacagacaaatccaaggctgtgaacaagcatccgcatttgaattccattaaaccaaaatctatgttgaacgaagtgaagtctgtacacagcattgcaaatgtgaacacattcctgtgtgaggcacatcaccatttgtcagttattgtgaatatgtgtatttttaagcaataagatgcagctggtcagttttctgggcaatcttggtgaggcatttcctgtgctgtggttgttctctaaccactgtgagaaacccaaataaaaatcgatcccccccaaaacaagtacgtatcacaaaaccatagtaatcaaaacaatatgacacttgcacaaaaacagacacattgaccaggggaacagaataaggagcccagaaataaactcatgcatttatgaccaataaatttttgacaaaggtgcccagaaaacgtaatgaagaatagacatttgtttcaataaatggtgttaagaaaactagatatccacatgcagaagaacacgaatgtgtatggtgtgtatccttatctcacaccatacacaaaaatcaattcaaaatggattaaaggtttaaacataaaactgtaaaactactagatgaaaacataggggaaaagttccacaatgttggtttggtcaaagatttcttggatatcacccccaaagcacaggcaacaaaagcaaaaatatatgggattgcatcaaactaaaaagcttctgcacagcaaaggaaacaatatggtgaagagacaacctacaagttgtgagaaaatatttgcagagcatacatctgatgaaaggctaatctccaaatatataagggactcaactcaatatcaagaaaacaaataaccaagtcaaaaaatgggcaaggtcctaaatagacatttctcaaaaaaaatacaaatgactaacataaaaaaagtttgtcatcctaattatcagggaaatgcaaattaaaatgacagtgagatgccacttcatacctgttagaatggctactatcaaaatgataaaagataacaagtgttgaagaggatacagagaaaagggaaccctcgtacactgttggtggaaatgtaaattaatactattatgaaaaatagataaaagttactcaaaaaactaaaactagaattactatatgatccagcaatcccacttccttgtatatatccaaaggaatttaagtcaatatgctgaagagatatctccaggctcatgttcattgcagcattattcacaatacccaaatatgaaatcaacacaggtgtctatcaactgacaaatggatgaagaaaatgtagtgtatatatacaatggaatactactcagccttaataggaaggaaaacctgatatatgtgacaacatgaattaacccagaagatatcacgctaagtgaaataagccaggcacgaaaagacaaatatcacatgatctcactgatatgtggaatctaaaaaagttgaattcatagaagtagagaatggaatggtgattatcagaggctagtagttgggggtagacatggaaaaggtagatgttgataaaagggttcaaagtttcagttagacaaagtttcagtgaactattgcacagaatggtgactgtaataaataacaaggtattgtatgtttcaaaatgactaacagagtagattttaaatgttttcaccacaaaaaagatatgtatgtcaataagatagacctaatctttccacaatttaaacatgtatcaaaacattacattgtaccccataaatagatacaattattatttgtcaatttaaaatttttcactaatttatattgttattgttgcaccaactcctttccaccaggcagattctcataaagactattttctcttttacatgaagcatttcctacacacctcttaatcacggtagcattgacgtcattccaccagattctatctccagtgttaaaataatcaagaacccagaaatctccaccagggggcaaccaatgcgtatcaaagtttcccactttcctttagatttacttatgggtaacttatgggaaaaaatacttaagtacttccctttttaaagaaaaaaattatatgaattctacaaaattatggcagaaaatttaagaagagcagatgcttcccaactcattctaaagggccagcattaccctgattctgaaacgaaaaagctttacaaaatccaagatccattcctgactaaagataaaagaaattttcagcaaactgtgaatacagaaaactttctcagcctgttaaagagtacctatgaaaaaaattatagctaacattatacttaatgatgaaatatttaatatatttcataacaggaacaagtcaaagatgtctactctaactaattctactcagcattcaacaaaatgaatatagtgaattcatactagaattttaaaagcaaatgtctttattcactgacaacataatcatctataaagaaaatcctacataacctataaaaaactgatggaacttataagttttgcaagtttacaggatataatgtcaaacaaagatctattatgtgcccataagctaagaataaacaattgtaaattgaaataaaaatgtcacttaaaagggcatcagaaatataaaacttagagataaatataaagtacatatgcataaagtacctgttcaccaaaaactacaaaacattgctgaaagaaattaaatgggcataatatagatgtagagatgtgttgaatttatgactcattttgaacaaggaatatattcatcatatattcatcagataagaattatgttacaggtctaataacattcaaatcaatacataatgtctcatagttcctgaatctaaaatatcaaagaaagaaacataaagccatatcatgtttaatgagaagggcttattatatcatttatgagatcctcttgtaaatcactagctgtttgcatactctctttattgctgccttcatctccttattcctgaatgtatagacaactggattcagaaaaggagtgagaactgcatcaaaaatagccagaaacttgtccatctgtgaattagggtgtggccgtgtatacacaaacatgggtggaccaaagaacaaaaggaccactgtgctgtgagctgaaagagtggaaagggccttggatgaaccacctgaggaatgtttccaaacagtaaacaggatgaagacgtaggagattagaagtatgaagaaagtacccacacagataaacccactgttaacagtgaccatgaactgcaatctgtaggtgtcggtacaggctagtctgagaagccgaggaaggtcacagtagaagctgtccaacacattagggccacagaaggctaaattaacaagaaatgccagttggaacagggagtgactgacaccaagggtccaggcaacagccagaaatgaaaggcacattcttgggctcataatggtcagatagtggaggggcttacatagggccacatatctgtcaaaggccatggctatgagcagcaccatctccacaccaccaacga

SEQ ID NO: 45392 - DNA, 7284 bp, Homo sapien
ctttctgaacaggtcataaatcatcttgggagaagtgacagagcaggctcctaagtcaatgaaggagagactggccagtagaaagtacatgggggagtgtaagtgagggtcagtggtcacagaaaacacaatgaggatgtttccagtaatgcttgccacatagagcacagaggaaaacactaggaggaggagctggatctcccatgaatgagtgagtcccagaaacaaaaactcagataccactgagtgattctctccatccattggtccagccaactgggctgtggctaaaattatgagaactaagaaaatggggaggaaattgtgattatgaagataataatatgtactaaaatcaatattgcaatgtcactatgaataaatagtatacagttattctgttcctcacatattaaaaacaaaaaatcaacataatattatcacaacatgtgagctgcaacctgatttaaacccatcatcaatactttcagtgtaatgtctgatctaaaattaacagattaggtaagaacaagattcctgactatccatgaaattcatcaggtgtttaaatgacctgtgatattaactattcctcatttccaacatattccatttgtacttatacatattcttataatttccttcccttcccagtttgcacccacaattctctgacagaaagtagacataagaggaaaacatgattaacagatggattatcactgcagtaagaggtgcctgggacagacttagttgaggtaggctgtggattgagagaatatagagactggggtatgtgaaatcggaaagcccacaactgtagcagactagagtaagtggactttcacaagaaatagaatcaccaccattatctaccacattttctcatgcttactgctatttaagtgcctcagtttctatacaatctttcacaattacgaagccctaaatggcttcccatcctgcaatgatttcataaggagcctatgccacctgtcatgtaaggctttttccatgcctaataaatatgttttggagggatttcaccagtgtttctgctaagatacatgcataaaatggccacagaggttgtgagaaatctctgcagtttctctttgtctatacacatgaaagtattgaagaccagcacttggattagttaagataatgttttaattcatcactgtctcctcctccccttggtaccagcttttatgttcattgcattccccacccttttaagtactcagtacctcctgcatggtaacctattctgatatttgatattatcatgcttaatttgactgaatccattcggatattttatctttaagaaatttgtagttttatacttttaatttatgataaaattagattaatatcaaacattaacaagtgacttttaggaaggtatatgagctttcttattgacttcaaactataaagtacaaactgtgacactagaaatttagtcctttaacacatattgtatttatatgtgaagtggagggtgagcagaaaacagtgttatatttctctgtgtccagatggatactcacctcaatcattttcctatagtagaaagtagttcctgaaaacacttaatagagattattttagaagttgctgaggtacaaataaaactgctatgctgacatcatacttttttgcaccaacaactccagttcttctgacacaaaggaccatcttcctagtgccataatttatcttagaccccaaaactcacagaggcacacatcatatctctaatacttgctcaccaccactggcatgagtctctctctatcctcttctacgtgaagtgattatactgtcacctctggagctaactgtccacagtctcaagatgcacactttttacaaccagaagcctatggactgggtgagggagcagaaacagccacaggtactgcccatcagggtaatgtaagtcagcatgcaaacaactgatcagatgaacatgaatagcaaggtgctgaggcactgggaagagggaccggaaaactctataattgttgaaaaagactcaagcccttgggaagggaaatgcctacgaaattatataaagaccattttatccaagttggtcatcattcagatgaaaaccatgaggcccagaaaagtaaactgagtttccagaattcacacaattgatagaataggaaccagaattcaggcctcttgcttcctattccagaaagacaaattgcaataataatcaaataatatgagcaatcatccagtaaaaataatctagtaaaaacagcaaaactcaaaagagtgatttttcctggttaagaccaaaactaaccatagattgctatacatagtatctattataaatactgaattatatagcagcctgacaataaatacataaaatgtgtacacaaagattattgaacctgtacaatacagtagtaaatagtaactttatatttgcaaagtgactgatcattactatcagaatttgtacccattcttcatattttgttggtcatataaccagttactacaactgcaaaaacaacctaaggtcatgtttctgtgaagtccatccttttggtctttaaattttattatcctcaaaggtcaattatgatctcaatcttttcttgtaattttactgacaattctccttcacactgatttgttctttctctaattcctgtaaatagaaagaaccaaaaaaagttgaaaaaacatgtattgtacatataacaaacaatcatatgtggtatacaatatatatcaaatgagtattaagataaacattcaaagagttttaaagaaaaaagtgttatagatattggagggcagaagagacgattgccattaagaacaggtggaggaggttatgccaaggacattgacctgaccctttaggaattagtgaaaattgaataggagaagaatgaggtatacaatgtgtgaaaaatacctaaattgatataacaggaggagaccttttcatatcaattatcattacttctgtgtatataaccatattagatacccacaaacgaatagaaagtggatagttcttgattgacaagtaagactaataatcccagatcatagtaaggtcttaacttcaagtcaataatctttattacttatggttcattcctctccctcatgttttccaataattttaaaatgcataattaaaacaattctcatttaaaaacatagtagccatgactaatgatcttccagtgggaaggtactaagactttacaacatgtttcttgctggggataagacagcctacagccagcattcaactcatttttctaaagtctatggatcaatttgaaatacagaaaaagtagaacagagataaagttaaaaaaagattaaaaatatgggaagaatgggagaaaggggagattagaagatatgaacaatgatttaaaaataaaagagcctcaaaggagaagagaaactgctaagcaagactaaggtaggatgaaatacagtagtctctgtttctgagaacacaggttaaaaagaacataaataaaataaatttatcacctttaatacactcattcaaggatgctactgagtttgactttgggaatttctcacctttaatacactcatctggggatgctacggactgtgacattgggttgcatttaaagggggagagaaagggcagttgcttctattatcgccctgttggactcacagagtttctttgaaaagcacagatgataataaatggaaatattgccttttatactatacaataatatacacatgcaattcactggaaaaagtatacttgttactatgatttgaggatactaccatatactaatcaagagaaacacatgtacagaacaaagaaggcacatgaaatttttactagtgtgtgttttccttgtgttctaccaccccaggagcagcttctgctactgaagatcacagtagagttatttccaaaagttgtgggtctgcagggtggacttatcacatagctgtttgccaaaattcaaaagtccagaaaccatttccaaattttcacctcttttatcttcaaatcctaaaactatgaaaattcacaaacttagctccatacattatggtagaaaggttaataatttggactttgaggttgaccaggcctgatttttgaataaattcacaaacttacctccatacattatggtagaaaggtcaataatctggactttgaggtcgaccaggcctgatttttggatccaggctgcaacactcacttgctgtgttaacgtaacaaagttcctagaccatgctgagcttcagtttacttgttattgaattagggatatagcgttcgaaggaagaagttctagtatttgattgcacagcagagaaattatagttattgaactggggatatgtagatagacataataaattttagtattcaattatacaatggagaaatcgtagggaacaataatttattatatattctaaaatagctagcagagaaaaattataatgttcccaacacaaagaaaagataaatattcaaggtgatgaatatccaaattactctgatttgatcattacacattgtatacatgtatcaaaaatatcacatgtaccccaaaacatgtacaactatgatacatcaataaaaaacaacaaaaaaaccaaaagaatagaaatcaaaaataaatacataaatacataaaatagggataataatacctcccttgtttgcttgctcccttgctccatttgtaagaaataagtgatataatataggtaaaaatacttaacctcatgcctaccacatagtatagcacaataaatgttatttattataatctgaggcctacctacataagtgactttcaagtatagaaaattatttctcaaattttaaatactccctgattctcaggtatggtaattagacctggctttaggtaaagctctcatgtctacacttggatttaatcacttaagtatatttcccagtgccccccccaaaaaaaattgctcctaggtggacacactaatcaaagacttcctgagaaatgcaggaagaagttttgtcctctgaccacgctacgccctttccttgatggtaagccccataatctaaagccataagtttcaattcctcacataaaaagaaaaaaaatgtcttttatgaccacttcagataacactggatatttcccttgtcattaggaatgagaaatgggaggaaggtaaacttgtagacaggagaattggtagatgcttgaaaggatttctgaaaactgtgcctatccaggtgtacaaatgtgttgaccagccaaggcaaagcagtcaaaccatacaataccttatcctcaggaaaatggacttttctcccaaattgcctttttcatgaaaaatataaaattctccagtttcaacctcatgttaaatttcacatgtgaagaaaacagtcatgcacatcagaaaattaaatggcgagtcaagaccaaattcctagtcacagttatgttctgtttccagtattaccttctcacttattcattttgttaaagtggagccaaaatagaagtgggtgtcacacatcaagaaagactgaagtcgtacaaagccgatccttatccaacgtgcattaaaatatgcatcaggcatgtgtgatgcatacagtagaagtggaacaaatcaggccaggtgcagtggctcacgcctgtcagcccagcactttgggaggccaaagcaagcaaatcgcttgagatcagcagttcaagaagtgtaacaaatcctctacaatataagtagagtgaaaagagatagctacagtgatgagggaaggcactatagtgatgtggcatttgagtatagccataaaagaggataaatattacaatacatgaatatagggtctaaagaagtcttttcaagtagattgtaaaatatttcaaaaatggtaagtttggtgtatgttgaagcatacagattgtctacatcctaaaaatcattttggtgaataaaggaaaataagaaaggtagtcaatattcatttgttgcctatcattagaaacttctcaaaggtatatgagaattattaaataaatttaggaagccagtgaaggtatgggtcccgggaattgaggatgaagccagtaattagggaagatgccccatctataagtgtgatgtatcaaatggaggaaaagaaaaacggagggaaggagttcccttaagagaagattgaaatagagcagacttggggggctacacagaggaactgggactacacagttccagctttaaggctatagaaacagaaatagaaatactggtaagtaaaaacccaaaggattggtgacttatcacagctggagtgaatacgaaggagcatgaactcaaagaaaatatcaagatttaagcaagaataaataggacaatggtaggtccatttttagaaattagaaagttgaacataaaatatgtcagggtggagaaaataatcacgtgtattttaagcaaataagagtattagatattgagatgctcaggtgaaaacatatgacaggatatatgggggaaaagtacaaattcaacatgtaattgtatagtaatccatataaaaataatagacggatgtgtaagagtgcataaggtccctgaaggaaataatacacaggaaaaaaagattaaaaagcaaagacccaactatagaaactatccacattgattatgtaaagtaggaaaaggaatcaataaactagacagaacatcacagaggtaggaggacaagtgctggcctcgaggagccaacacagaagcaggtatcaagaataaaggaggagaagagagaacaaagagagagagaagagaacttctgtggcagaagatcaagtgggatggtagaataaaggagaagaaatacaagaaaattgaaataaaatttacagaaatgttctacattgtaagtgggcagttttgacctggcacattgttggcacacattataaatgtcaaatgtattaatgaatgaatgaatggataatataatgaatgtgatggagttgtcaaaagctgaattaattaaaagtccccacgagaggttagatgacaaaattttcagaaactttccatgccactctgttgtgacatcaacagtgctggacccttgaaatcaaaccaaaaggattccaccatgagaatgaaaagggctgagaaggggaatgctgggtgacacagaaggtgacaaagggcgaaaggtttctaggcatttgatagactgatgga

SEQ ID NO: 45393 - DNA, 1927 bp, Homo sapien
cgggatagccatgttaattgggtgaaataaagcatatttgattttcttatgacaaaaaagggcttttgccattgtctacagatgatactttaaatctttattttatgactaaaggtgaattccagagcaacattaaatgttgtccctttaaatttttaatcatttacataacgattaccataatattcaatttaaacataaaatgtaattgaaagtatgagattaatatgtggacatgaaatcatataatgttccatggaaaaaatagaatgtataaggcaaagaggtttaaagtaacatcaaaactaatgctcactatacaaattctatgaaatcctcataattacactgtgaagcaggtgttgttagagccacataatctcaaacaaattatttattatctaaaattacatagatattaaaaggttaggccatatatgaatttaggattctctcaaaaattttttctctttctcctacatcaaacttccctaaattatagaaaagtcacaatgttaccaaacatattcacaaaacacatataatcttgaatccaaatttcagttacagcagaaaaaataaaactctagatcaatctcaatcgtgtaaataaattcagatttccaatctaagagtctcaatttgacatacttctttctctctcttctttcaaaccaggagaaatataaatatgagccacaaccttacaaaagctagaaaatatttacaattccacacaacaacacatgaagaaaaccttctggacatcaaaagtttaaaccagtcaagactgaacaccaagataaagtgcatgcctctgaagagcttgagctagtcaagaagcccagaaatccctaaaagaggtgtgtatactgaggactgaggatcaaaacctgtgatctttacttggaacagaaatattgcagcatgtgaaccctccacagagtgacagagggaaaggagtttaaagggaaacatgcaaatgtatcacctttggaataattaggacacgtgtgtggtgtaatgaaagaaggcaaaaagatggggaagaagccagacagatggcaattttcattctattatgaaaagaaaaggataagtcacaagtcacatgatgaaattaacaactatgaatccactctaagccatagtcaatcctatagcctaggagtcattctaacagatgagagtgttttggagacaagattccaaaactcgtctgccttccatcatacttactacccccagctcctcctccacaatatcctttcacaagtatctagaatattcaaagactaataatattatataattatttataataattgtattacaaaaataaaacttgatgacctttataaaaatactagaagaaaaagggaaaattacataaggtacagaacatacaaattataccatgaagcagtaaaaaacaggatcaaattttctatgttttttaaaaatatgccttctctaaaatgttttctctctgaaatgatatttagaagacataattgaaaataaatacaaaataaagtgataaaaaataatctggcaaaattcaggatgtaatgagtaaagacaaccatgaaagaaatgaagatcaataaaagcaggaaaaaaagtgggaagtggagagaataatgctgctaaaaacacagataagaatataaatgacaggcttaaatatatcctgagcaaaacgaaatagaaaacacaagaaggtgaaatgtaacattaaagtcaggtccaacaaatgagaaattagtgtgaaagagctcacaatatctggttaaaaaattcaaagataaaagaaaacttttctgaaatgaagaaaacattgaatctaatggttaaagggcttatctttatccagaaaaaatgtgttatagtatgaccacatcaaggcagatgcaactgaatttac

SEQ ID NO: 45394 - DNA, 2055 bp, Homo sapien
caggggctaacacctacagtcccaacactttgaaaggccaaggcaggagaatcacttgagcccaggagttcaagataagaccagcctgggcaacatagcaagaccccatctctatcagaaaaacttaaaaaagaaaactatccactaaaaatgaatagagataacatgatacaagtgagcattctgaagcctaatatcaaaatgttctggggtttgcggttaaagaacagaatgcaaatgttacaaaccataactgtataaagactaattatattcataacaaaaataagaagagaaagatagtagaaatatattctggtccattcaactttcacagtgggagagaatcaacaaattatgttatgggtgattaaatattattttaaaagataaaggtcattattagaaaaattaaaaataacaaaatcaaataaagttggatgacgaaggtgggagaggaaagtgggtttaaggggtaaagtggaactatattaaaagagtcaatggagagcacccttggaaataacacaaaaattaaagaactaaatataatttatacagcacataactaaactataaatcttcaaattaaaagaaaataggtacatacaaaatatcacatacagagaaatattaataccatgaaaatattaaaataaaagcataaaattaattcatttatttaccctattagtattttttgaacacctatgtgccaggtattgtgctgaatgccagtaagatatagttcctgcatcttggagttttcgtggaggagacagagattaatcaaacaatcacacaaatgtaaaattgcaaccataaaaattactctgaaatacaatgaaaattactataagagagggatttgatgtgagtcagagaagtttcccctaagaaagcaacactgaagctgagatctaaagggtaaacagcagttaactgagtggagaacaaaggttttcctgcagggggaacaatctgctccccgaggccagagtggggccttgggagttgtgcctgaaaccacattgtgaggaagtgaggggaagcattgtgcagataatgctgaaataagtagtggaagatgcttcctaagagaatgagaaatccaagactactaagcagaagaatgatttgaccagatttcacatttgtaaatatcactatggttacaatgtatagaatggattttaaggaattcaaattggatacaggtgagtcaattagaaagcaacatgcttgctaaggcaagaaatttgattacttaaactagatatgggagttttggaaataagtagataaatttgtcatatatttgagataataaatcaccatgacttgatggtagacttagttggagatgccctcactaatgcaccatctaatgcttcaagtctaataattattcaattcctccagagccaccaatccaatggttctaccatatttatgctgtcattcactttactgatatccttcttaccttacctcttttcccactttatattccatgatcaataccttgctccctcgtaatgattgtactcactcttccaaacaacaatcctgataaatcctactctctgccttctacatcttgataccacacagctatatgtggctagataaaacaatcacactgacaatcatcctatactttctgaatccatcactcttctactttttcagatcttttctttctccctcatccttaccatgtaatgaactcattttgcatgtcaagggctaaaagttgaatattttaaaagttctcattttcccactactatataaaccaacaaatatctttagtctgcattcacaaataacataacaaatgagctcttcatatttctatccgtggtgaattaagatgactagaaattttgtggcaccatcccgttgaaaacgtggggacatattctttctccttgaacctgggtgggctctttgactgctttgaccaataaaatacagtgaaagtaaaacttccagttttgatgtccagatgttaaaagccttgaagcttccatttctacatcttggaaccaa

SEQ ID NO: 45395 - DNA, 1627 bp, Homo sapien
cggggtctggaggacagcagccctcttctcatagctccactaggcagtaccctagtggggactctgtgttgggggcttcaaccccacatttccattccccactgccttagcagaggttctccatgaagacctcacccctgcagcaaacttctgtctggagatccaggcatttccatacattctctgaaatctaggtggaggttcccatacctcgattctggacttccgtgaatccacaggctcaacaccacatggaagctgccaaagcttgaggcttgcaccctctgaagccatggcctgagctgtaccttgaccccttttagctgtggctggagcagctgggacacagagcaccaagtccctaggctgtacacaggcaaacagcagaggggccctgggcccagcctatgaaaccattttttcctcctaggcctctgggtgtgtgatggaaggggctgccacaaagatctctgacatggcctgaagacttagcgattaacatttggctccttgttacttatgcaaatttctgcagccagcttgaatttctcctcagaaaatggatttttcttttctatcacagtgtcatgctacaaattttctgaacgtttatgctctgttttcctgttaaaactgagtgcttttaacacacccaagtcactcttgaatgatttgctgcttagaaatttcttctgccagataccctaactcatctccctcaagttcaaagttccacaaatctctagggcagggacaaaatgctgccagtctctctcgatagcaagagacacctttactccagttcccattgagttcctcatctccatctgagaccatctcagcctggatttcattgtctatatcattatttgacattttagtcaaagccattcaacaagtctctaggaagttccaaactttcccacattttcctgtcgttttctgagccctccaaactgtttcaacccctgcctgttacccagttccaaagtcgcttccacatttttgggttatctttacaacagcaccccactctaccagtaccaatgtactgtattagtctgttttcatgctgctgataaagacatacctgagactgagtgatttatgaagaaaaagacacttaatggactcacatttccaggtggatggggaggcctcacaatcatggtggaaggcaaaaggcacatctctacatgatggcagacaagacagaatgagagctaagtgaaaggggaacccccttataaaatcatcagctcttgtgagacttattcaagaccacgagaacagtatgggggaaatactcctgtgattcagttatctcccgttggatccctcccacaagacacggaaattatgggagctacaattcaagatgagatttgggtggggacacatccaaaccatattgctgctgaatagatcatgtagacaggctctcaaactacacggagagcaagagaggcccaccttaccacaacatttcatccaatccactaataaaacaggcacatcactgaagccaccttcaactctccagactacccagctgccagctgaataccacagatggctacagttaataccacatggagcagaatcatgtagctaagccctgcttgcg

SEQ ID NO: 45396 - DNA, 6117 bp, Homo sapien
cgcaagcagcccttcacgccctcctcccagtacaaagctaattgacttgtgagaaatgttaagcttggaagagtcagcatcgctgcacttattttttattctactctgacattagaataatccttgagtgggggaaaggttaaaaacccccctggataagtgttactaattaatgatgattgttttaaacaatgtttggataatttttccttgtcccttgacataaacttgataaataactgagaagtgagaaggagattagtgggttgattaaattccattcaggtacttaaagttagctccaaaaatttagctatttgtaaattgtcatgcattgttaatgtataagagatgtagatttcatttatctttggtggagcgagatgaagcagtgaatcattgaagactgaaagaaagaaaaaggtcttttcccttttctttaagaagcatcattagttaaaaacatgttagttgataccagagaactatatttaaagggacagcaataagcaaattgattactctggtgattattggagtgacattgccttttagttgtactttcacaaaaattcacaatatttgccaaagtcaagttatccattacactattaatttgtcattcttttgtttatatagtcaatctctatctcaattggatctatctcaactgcttctaaacaagccaccatagtctctcccatttcaacaatctcttccaagtaccacttcatttcttcttttcatatttttgaaaacttttgaaaaactacctattttcctcctccatttcttgttcattccattctagtggacatggaatctgttcctcctccaaaacggaatttggtaacccttaaattactaaacccaaaacaacatgttgtctttatctttacctctctgtggcatttaatgataagaccactactttcttctcttttacccttctttcttgaattcagtcaaacaacgtacttacatttttcgtcttattctccatcttagaaaccacctcagctttctccattcagctataaaattgtgcttttcctcaaagattaatctgcctctcctctcactctatactatctctgttagctaattttatttgtgcacattgcttatactgggcattatatacacatatgcatgtgtgtacatgtgcatacacacactgtatgtggacatgtatatatatatatgtgtgtgtgtatatatatagtatatatataaattacaataacataaaggtggcattttaaattagtggaaattaccctgatttgatcactacacattctatacatgtaaagaaaatatcactctgtatcccaagaatatgtacaattatggtttgtcaaatgaaaaagttcatacattgaaaaattttagataaatatcaaactttctctgaaactgtaactgtaaaatgtaaaaaacagtaattgctatattgcttatttctgagtagaagaatatgagacatttccctaatcattatgtgtaattacaattacatagaagaatatgagacatttccctaatcattatgtgtaattacaattacatatatatatgtaattgtaattacacataatgattagggaaatgtctcatattctatatatatagacagaaagagagaaaatatatgagggagagaaggaatctttccatctcctttgagttccacggtgttgagagtcaggacaactgcaattgcttcatcatgcctgcttgcaattatagggcttttgaaccatttgttccctccttagatatcctcatttttttcagattcttgcttagaagtcactcctccgtggacctcctctgacatattaaacattgcagtccattataagctgcaagaggacagggatttttgcctgttttattccctactgtatcaccaggggctacagcaatatctgacaaacagtgggcatgtaatgaatatatgttaagtgaagtaataaattcaatcaaatcacatcacctgtttaaagcacttcattggcttcacattgcacttagaataaagagaaattctttttatacaatataagttcctgcagaatgcagacactttctacttctccagcctcttttcgactcctctcctactagcttctgtatttaagccacattagacctttcttcagttttttatatagactttgtcgcatcacacctcagagattctgtacatgttcttcctcctgcctagaaaggatcgtccctccactttcgccaactaatccctgctcaacttttcatctcagcaggaggcccattctctttggcaatcctctggcctccagcccatttattatatgctcacatgtcaacatgtacttcgtacagcatgtaacacaattgcacttttatattttaacaaattatatttcccatattgaactgtaagtctcctgaaagcaggaattttgttcttgctcatcatcaactttttcaacatccagtgcaccatttagaacttagatgtagtcaatacaggtttgtggaatgaaagaggaaaagaaagaattaatattcctttaaattaggatggcaaagatcgtatatagaaaattggctaagttgtggtccattcatgtttgctcccaattaaggagcacagctatgaaaaggaaggcttcaaattaataaccaatagatttttttaaaaagaaaactggccaggtactgtggcttatgtctgtaatatcagcatgttgggaggccaaggcaggattacttgagcccagaaattccagaccagcctgagaatttggcaaaactctgtctctacaaaaaatacaaaaattagccaagtttggtggcatgtgcctgtagtaccagctacttgggaggctgaggtggaagaatagcttgagtctgggaggtcaaggctgcaatgagctgtgattgcaccactgcactcaagcctgggtggtagagtaagaccctgtctcaaaaaaaaaaagaaaaatcactaagcaaaataagacatgtgaaggatcatgtcaaaggtaagaaaaattaggggaacattaaaagctttcttcccaagccactaaatcaacttgactaacaaaattaccacttgatttagcattagaaaattacattacatatcaaacataaacccattaatcaaatactaaagaaatttctgagttaaatggtataatgttagcttatgccagagctgaccttgaaagattgttcaaatatggctcagtgtgattgaaagttctgtgtgaatatgtttttggaaagatccaacagcaacaccttagtgtatgtttttgaaataaaatgtatctgagtagcagcaaagttattctcaaatttccattttatagctggagatgtcataccgtgacgtatatgataggacccaatatggatcaatcccttttagaagtcaatcaggaagaggggagcagttaaaacagttgcttggtttacaaacattagaacaattttcttattcacaccatctgattattgtattttattttttccccaacgtttagactacacaatgagttaagaatgataaaaataagctcaccaatatactatgtacatatttaccaaaatctgtgcatgcttatacatataaacacagctgataatttattagttaggctcatttgtaatttttgtcactatagaccagttttttatttaaattgaagattagtatacattttaaatgattagtcaaaataaaaaatctaaaatgtgctctaaatacctcttaggtcagaaaaaaaaagtcaaaagctagagtatagagaaattaagaaacgccctaaatttctaatctgacaaaaattcatacaagatttaaatattttaatggaaaatagaacagaactaattattgaagaaattatagaaaggaaacaaaataaacagattatatggaggatttttagaagataagtaaataaattaatatactaggaaaaaacaagggaaatatacttgataaataaatacaggtaagagttcttttgaaataatgataaaatagaaaatctctgtcaaaactaaaaggaaagatgcataaatatataaataaatgataaaaaatgttgcatacatatatgactttttcagaatcaaaaaatttaaatttctgtaataaaatttaaatgtttataaatttaaaaaactagaagaaagaatgttgactgttcacaatacaaataaatgacaaatatttgaggtgatggatatgctaattatccttatttgatcattgggcattgtatacatgtatcaaaatatcactctgtatcccatgaatatgtacaattatttgtctcaaaaacaaacaaaaaaaaagataatgggagaatgttgaaaactcagagagaagagcaactctcacagatagggatccagataacattagcagctgatttctcggcagaaaccttgaaggccagcaggcagtggattatatatttaaaataatgaagaaacctgtcaattgagaaatatatagctggaaaacttatccttcaaaaatgaaggagaaattaagacatttccggatttttttttaaaactgaaaaaaatccatttatccctgaatttgacattcaggaagtgttaagtccttcaggttgaaataaatgaactctaggcaataactatgtaagtaaataagcaagctgtatgaatatacaaagctctctggtaaaggtaaatacataaacaaacataaaaacagtcctattgtaattttggtttgtaactctgctttttattttctacataatttaaaaggcaaatgcataaaatgtaattgtaaatctgttagctggtatacaatgaataaagatataatttgtcacatcaataacataaaaagagtagagctatatatatagcagtagaattttggtatgtgattgaacttaagttgaaataaattcaaattaaaatgttataactctaggatgttatatgtaattctcatagtaaccaaaaatgaaatatatatagaatataaacaaaaggaaatgagactagaaacaaaatgtgtcactacaaaaaaatcaactaaagataaaaaagaaataattgagaaaatgattggcaaaaatcagtaactctgacgtattaaaactttccatgctacataaatctgaaaactctatttcacataaaactggagctgaaagaaacaaatatttacctataaagttaaaagttatatagggaacaaacactaattttttttagaaaaaattataaaaagtaaaaatatgccttatactaccgtaatttcatgttttacagctctgggaaaatagaaaataaaatgttctgttagcatgaatccctctgtgcccccaaaaaaccctatggattgcatcattattacctaaaaagtctattctcaaatgcagcagagtgatattttttacaaggtagatattaattttagatatggaataatattgatgatttcaattttataacactgggttaagatgaaagaatgagaagataaaggtccctcagcaatataactcacaaacatgttcagaagcagtaagaagttacattaattatcttttgaaagtcgataatctacatctttaatgtatgcatatagcatagctaatgtactatcgctgggtccatttattcaatgaataattgccgctatgtgtcagacatttttctaggcctaggaatggatacataagtgaacaaagcaaagattctggttcttgtagagtttccattaaaagacaatttagtaaaacttttcttcccccaaattataaaatctgtaagatgatttaacaacatgtgtaaaagtcattgtgggccaggcacggtggctcataccaggtgtggtgactcatagcactctgtcacccaggctggagtgcagtggcacaatctctgctcactgcaacctctgcctcctgggtacaagcgattctcctgcctcagctttctgagtagcaaggactacaggtgcacaccatcacgcctggctaatttttgtactattagtacagacggagtttcaccatgttggccaggctggtctcaaactcctgacctcaaatgatc

SEQ ID NO: 45397 - DNA, 1611 bp, Homo sapien
cggccttattttctacaactttggtaactttagcatataccccaaatctgtaagacataatattataattcaaatgcaactcatggcttctctttgtactctttctctagcttttgaattatttattctaataccagttttaattctgacacaaaatcatgggagttctaatcaaaatccaaccttttatcataaaaactatgaagaaattatgagtagaatttaaaaaggaaaataggcctattaattagatttgtctttgtagcatttaactctataataaataatattttatgcctatgagtccccaacaaagcctccagcttctatttagatacaaactgtaaaagtcactactggatccacaagcaagactatggtaaataaatttctccacctaaccagcttcttttacatgatgttacatgtttcttttgttttttcattttggcaaatattgattgtcatcttcgtgtttgtctatgtcctaagtgctgggatacagaatctgaaaagatggacacaggacctgccttcaagttcacccccttttttttttttttttgagatgcagttttgctcttgtcacccaggctggagtgtaatggtgagatctctgctcactgcaacctccacctccagggttcaagtgattctcctgcctcagcctcccaagtagctgggattacaggtcccagccaccacgcctagctaatttttgtatttttagtagagacagcgtttcatcatgttggtcaggctggtctcgaactcctaacctcaggtagtcgacccacctcggcctcccacagtgctgagattacaggcatgagccaccacgccctgctaggagttcacgctttagttggggaaaatatacaataagcaagccagtttttaaaatgagaactgcaattagagttaaatgctacaaagacaaactcacaggaagatgggatgtagaatgataaggctctcagaatagtaagagaaactattgcttcttacgatgtttgtctttctttgtatcggtgctcagctgagtctgcagtgcttcagaggcagctttcattttataaaaatctatgatttctccttccagttgttttttctcttcctcgagcttccttatctcctcctgttgaatcattttaagatgctcgaacttgtcctgcagctgtgaaaccaatgtgcagttgtgacaccaaagcagtgtggctgaacacctaaaagaatacgctttttttctgattatcaaacaaacccaaatcatcacagtagagcacgatcttaataacaatctcaaaaactcaggagtaaacactcagatatggaatttttcttttctttcttttttccttttataagatggagtctcactctgttgcccaggctggagtgcactggtgcgatctcagctcactgcaacctccatctcccagttcaagtgattctcctgcctcagcctcttgagtagctgggactataggcatgcaccaccactacaggcgtgtgccaccacacctggctaatttttgtatttttagtagagatggggttttgccatgatggccaggctggtctcgaactcctgacctcaggtgatcctcc

SEQ ID NO: 45398 - DNA, 1287 bp, Homo sapien
cgccatgagctggacaggaactgggccaaaaaaggctgttgtgaggcagcagttgtgcctgtagacccagccaagaggaagaggtgggcctggagaagcccccatgaggcagaggttgggcctgtagacgctgacaggaggcaggagctgggcctggacaggtcaacttgaggagattttgggccttcataggccaccaggaggcagcagttgggactagagagtctgacttgagtaagttttgggcccggagatgacgtcctgggacaggagttgggcgtggagaggccaccgtgaggcataagctggatgtagagaggccagtgtgaggcaagacctgggcctgtctaggctgctgggagacaggcaggaatctggccagggaaggttgccatgagacaaaagttgggcctggaaaggcccttgtgaagcatgagcttggcctaaagaggccactgggtggcaggagctaggtgtgtagaagctgctgaaaggttgggagcttggcttggggggtccacagtgaggtagatgctgggcgtgaagaatctgctgtgaggcagactttgggactgtagaggctgacgggaggcagaggctgggcctggaggggccaccaagatgcaggagctgggcctggagaggctgcaaagaagcatgagctgggcctggtgaggtcgacttgagaaagttcagggcctggagagaaggctgggaggcaggagctgggtctaaagaggccattgtaacgatggagctgtgcctgtggaggctgttgtgaggcagtagcctcatctgcggaggctgccgtgacatagggtatgggcctaaataggccattgtgagtcatgagcttggtctgtagaggctgactggagaaagttctgggcctggagaggctgccgggaggtaggagctgggccaaaagatgtaagcacatttgcatttattaggcactttatttccattattacactgtaatatataataaaataattatagaactcaccataatgtagaattagtgggcgtgttaagcttgttttcctgcaactgaatggtcccacctgagcgtgatgggagaaagtgacagatcaataggtattagattctcataaggacagcgcaacctcgatccctcacatgcacggttcacaacagggtgcgttctcctatgagcatctaatgctgctgctcatctgagaaggtggagctcaggtgggaatgtgagcaaaggggagtggctctaaatacagacgaagcttccctcactccctcactcgacac

SEQ ID NO: 45399 - DNA, 1810 bp, Homo sapien
gctccatggctcaggggttggggacccctgctcaagtgcatccaaagcgacccttcccacaccagtcttcacagtggtcaagggcagcaaccacttagctcccaaggcatgtgcctcagctggcatttcgtcacaatcaacagtaagtggtagcttgagtcactgtgaggtcacctactggaaatcaccagcaccccatttcccactggcaaagagctcagcactgccccctgggaaaccaaacctatgcccaaatcccatctgtgtgggtctacctcctgggacccttcctaacatattagtcagagtccaatcaggaagcataaaccactcaaaagtttaaagtggtaaaatttaatacagagaattattcattataacaggtgaacagcataatgagagattggctagcacagagtaaagagaactctagagaatatgggactagcccaggccaggcatggtggctcatgcctgaaattccagccattacagaagctaatgcaggaggattgcttaaggccaggagctagagaccggtctggacgacacagtgagaccctgtctctatccaaaagaagaaaaaagttagctgggggtggtggtgcacacttgtagtcccagctactcagaatgctgaagtttgagcctgggaggtcaaggctgcagtgaggcatgattatgccactacagtccagccggatgacagagcaagaccctgtctcaaagaacaaaaccacaacaaccatttacagacagaaaagaaatagagctaataagctgaggaaagatgttgaaatgtgacaagtaaagtaatatgaggtcttttgtctatttaaaataatcaaacaaaaaatggcttacgaaattataataccctgtgctggcaaaggtgcagtgaaatgggcactttcttatactatgaggggtggttaaattgtgtataagccttccagggtaaagcctgtcaattttttaaaataatggagacagggtctcaccatactgccatactgcctcctccaactcttggcctcaagcaatcctcctctcttagcctcccaaagtgctaagattatagctgggaggcacccaaaaccctgtcaatttacatcaagggtaaggagaatgtccattcaccatgactcacagtaatcttacttctggggagacaattcaatctaagcaaaaggtcatctgtacacacacagtaaaaatctgggagtaactgaagacagagttggtaagtgaaataagaaacagttataagaaattaaactatggtatcaataggcacctggtaaaaggtcagttgatgttagctgctacttttttgttgttttgagacagggtctcactctgtcacccaggctggagtgcagaggcctgatcatgactcactgcagtctcagcctccctgggctcaagtgatcctcccacctcagcctcccaagtagctgggactacaggaacatgccaccacactaggctaattcatgtatttttctgtagggatggtgactccccctttgtttccaaggcctatcgcaaactcttggcctcgagccatcctcctgcctcagcctcccaaagtgttgtgattaccagtgtgagccaccacacctggccagctgctacttttatcaatattattcttattccactcaattaaaaattattattttcaaggctatgcaacagtatgtatcctacagcgtaattgtaaaaacatacacagtcgtcatccctcagtatacagaattagttccagccccccatctctgcatataccaaaatccatgcttactca

SEQ ID NO: 45400 - DNA, 1807 bp, Homo sapien
gctccatggctcaggggttggggacccctgctcaagtgcatccaaagcgacccttcccacaccagtcttcacagtggtcaagggcagcaaccacttagctcccaaggcatgtgcctcagctggcatttcgtcacaatcaacagtaagtggtagcttgagtcactgtgaggtcacctactggaaatcaccagcatcccatttcccactggcaaagagctcagcactgcccccgggaaaccaaacctatgcccaaatcccatctgtgtgggtgtatctcctgggacccttcctaacatattagtcagagtccaatcaggaagcataaaccactcaaaagtttaaagtggtaaaatttaatacagagaattattcattataacaggtgaacagcataatgagagattggctagcacaaagtaaacagaactctagagaatataggactagcccaggccaggcatggtggctcaggcctgaaattccagcaatttgagaagctaatgcaggaggattgcttaaggccaggagctagagaccggtctggacgacacagtgagaccctgtctctatccaaaagaagaaaaaagttagctgggggtggtagtgcacacttgtagtcccagctactcggaatgcggaagtttgagcctgggaggtcaaggctgcagtgaggcatgattatgccactacagtccagcctggtgacagagcaagaccctgtctcaaagaacaaaacaacaacaaccatttacagacagaaaagaaatagagctaataagctgaggaaagatgttgaaatgtgacaagtaaagtaatatgagttcttttgtctatgtaaaataatcaaacaaaaaatgacttactaaattataataccctgtgctggcaaaggtgcagtgaaatgggcaccttcttatactatgaggggtgtttaaattgtgtataagccttcccgggtaaagcctgtcaattttttaaaataatggagacagggtctcaccatactgccatactgcctcctccaactcttggcctcaagcaatcctcctctcttagcctcccaaagtgctaagattatagctgggaggcacccaaaaccctgtcaatttacatcaagggtaaggagaatgtccattcaccatgactcacagtaatcttacttctggggagacaattcaatctaagcaaaaggtcatctgtacacacacagtaaaaatctgggagtaactgaagacagagttggtaagtgaaataagaaacagttataagaaattaaactatggtatcaataggcacctggtaaaaggtcagttgatgttagctgctacttttttgttgttttgagacagggtctcactctgtcacccaggctggagtgcagaggcctgatcatgactcactgcagtctcagcctccctgggctcaagtgatcctcccacctcagcctcccaagtagctgggactacaggaacatgccaccacactaggctaattcatgtatttttctgtagggatggtgactccccctttgtttccaaggcctatcgcaaactcttggcctcaagccatcctcctgcctcagcctcccaaagtgttgcgattaccagtgtgagccaccacacctggccagctgctacttttatcaatattattcttattccactcaattaaaaattattattttcaaggctatgcaacagtatgtatcccacagcataattgtaaaaacatatagtcgtcgtccctcagtatacagaattagttccagccccccatctctgcatataccaaaatccatgcttactca

SEQ ID NO: 45401 - DNA, 1812 bp, Homo sapien
gctccatggctcaggggttggggacccctgctcaagtgcatccaaagcgacccttcccacaccagtcttcacagtggtcaagggcagcaaccacttagctcccaaggcatgtgcctcagctggcatttcgtcacaatcaacagtaagtggtagcttgagtcactgtgaggtcacctactggaaatcaccagcatcccatttcccactggcaaagagctcagcactgccccctgggaaaccaaacctatgcccaaatcccatctgtgtgggtctacctcctgggacccttcctaacatattagtcagagtccaatcaggaagcataaaccactcaaaagtttaaagtggtaaaatttaatacagagaattattcattataacaggtgaacagcataatgagagattggctagcacaaagtaaacagaactctagagaatatgggactagcccaggccaggcatggtggctcatgcctgaaattccagtaatttcagaagctaatgcaggaggattgcttaaggccaggagctagagaccggtctggacgacacagtgagaccctgtctctatccaaaagaagaaaaaagttagctgggggtggtggtgcacacttgtagtcccagctactcggaatgctgaagtttgagcctgggaggtcaaggctgcagtgaggcatgattatgccactacagtccagcctggtgacagagcaagatcctgtctcaaagaccaaaacagcaacaaccatttacagacagaaaagaaatagagctaataagctgaggaaagatgttgaaatgtgacaagtaaagtaatatgagttcttttgtctatgtaaaataatcaaacaaaaaatgacttactaaattataataccctgtgctggcaaaggtgcagtgaaatgggcactttcttatactatgaggggtggttaaattgtgtataagccttccagggtaaagcctgtcaattttttaaaataatggagacagggtctcaccatactgccatactgcctcctccaactcttggcctcaagcaatcctcctctcttagcctcccaaagtgctaagattatagctgggaggcacccaaaaccctgtcaatttacatcaagggtaaggagaatgtccattcaccatgactcacagtaatcttacttctggggagacaattcagtctaaacaaaaggtcatctgtacacacacagtaaaaatctgggagtaactgaagacagagttggtaagtgaaataagaaacagttataagaaattaaactatggtatcaataggcacctggtacaaaaggtcagttgatgttggctgctacttttttgttgttttgagacagggtctcactctgtcacccaggctggagtgcagaggcctgatcatgactcactgcagtctcagcctccctgggctcaagtgatcctcccacctcagcctcccaagtagctgggactacaggaacatgccaccacactaggctaattcatgtatttttctgtagggatggtgactccccctttgtttccaaggcctatcgcaaactcttggcctcgagccatcctcctgcctcagcctcccaaagtgttgtgattaccagtgtgagccaccacacctggccagctgctacttttatcaatattattcttattccactcaattaaaaattattattttcaaggctatgcaacagtatgtatcctacagcgtaattgtaaaaacatatacagtcgtcgtccctcagtatacagaattagttccagccccccatctctgcatataccaaaatccatgcttactca

SEQ ID NO: 45402 - DNA, 2630 bp, Homo sapien
gctccatggctcaggggttggggacccctgctcaagtgcatccaaaacgacccttcccacaccagtcttcacagtggtcaagggcagcaaccacttagctcccaaggcatgtgcctcagctggcatttcgtcacaatcaacagtaagtggtagcttgagtcactgtgaggtcacctactggaaatcaccagcatcccatttcccactggcaaagagctcagcactgccccctgggaaaccaaacctatgcccaaatcccatctgtgtgggtctacctcctgggacccttcctaacatataaccttcataacaaacttgagaggctgaggtgagacaatcgatttagcccaggagtttgagatcagcctggacgacgtaactaaatctcatctctacaaggaagaggtgggaggatcacttgagcccaggaatttgtggccagcctgggcaacaaaagaagaccccatctggccaacatggccaacctggccaccacggtgaaactctgactctacaaaaatgatctgggcatgggtgacatgcatgtgtagtcctagctacttgggaggttgagatgggaggattgcttgatctcagaaggccaaagctatagtgagctatgatcacatcactgcactccagcctggatggcacagggagattctgtctcaaaaaaaagaaaagaaatatatatttaatctctgtccctggttcctggcacagagcttctaaagctcttacaaagacctcagtgatagatgtgacaggagcatcttttgttttaatatttgatcttggtcccaggtttctaacacaagagcctctaagaactttgggatctccagcatggtaagaatgcatttggggatgttgttgagatgactgggtgactgcaagctcctaaatttcttcaagaggagggctgattaccatgcaaccacatggtaagaggcttggaactttcagcctcatgcactgaactccagggggaagaggggctggagactgacttaatcaccaacagccaaaggttttatcaatcatgcttgcataataaagcctccataaacaccctgaaaggggtttgcagagctttcagggttgctggacacaggagatgctgggagggtcgcatgttcaacagagggcatgggagctctgtgcccctccgaacttaacttgccctgggtatctttcttttttttgagacaggatcaggctcttttgtccaagctggagtgcagtggcacaatctcagcttactgtaacctaagcctccccagtccccagctcaaggtatcctctcatctcagcttccctagtagttggaactctaggtgcacaacaccacaccagttattattattattttttaattttttatagagacaggttttcaccatgttgcccaggctggtctcaaactcctgagtttaagcgatcctcccaccttggcctcccaaagtgctgagattacaggcatgagccactgcatccagcatgcacgtctctttcattgactgtttctgagatgtatccttcacaatgaaccagtaataggaaatgaactggccagatgtggtggctcacatctgtaatcccagcactttcagaggctgaggtgggaggatcacttgagaccaggaatttgtggccagcctggccaacacaacaagaccccatctatacaaaaaataaaagaaactagccagatgtggtggtgcaggcatgtagtctcagctactagggaggctgaggtgggagaaccactggaacccagacaatcaaggctgcaatgagctatgactgcaccattgcacaccagcctgggcaacaaaataagaccctctctctcagaaaaaaagaaaataaactgtttttctgagttccgtaaactgttctagcaaattattaaacccaagaagacagttacgggaacccccgattggtaacaggttggtcaaaagtatggtgacaacttaggacttgccattgtcatctgaagtgaggatggcctcgtgggactgagcccctaacttgtggggtctgtgctaactccaggtagtgtcagaataaagtcatgggatacccagttaatatccagagcactgaagaatctggtgtagaaactccatacatacattcagtcggaagtgtgtgagtagagacaaacatgggcttttctgtcacctacctgcttaactgcataggagaggcaatatgtggtgctcatgaacaaagcaaacattaaagtcagaccagacccaacatttgactcagtcttaatatccaggtgagcctgcgcaaatcattcattattcctaaggttttcatcactccattcataaaatggggataactgtggcacctatatgtgattctgtgagaattaacgaaatattatgcttggggttattgtgatcattatacctgttccaaactatttgacaaggacagtgatggatgaagacatcaaaaaatcagaaactgcaatgaggtctctcaggcaaaattccatacaagcaaattactgtgtctacaaagcattcctgccacacttaattcaccattccctgaacaaaatatgccatcttcgttgttcaggtctgtacagtgctggtttcccttcc

SEQ ID NO: 45403 - DNA, 2270 bp, Homo sapien
cgtgtgatgtctcccctggacatccagctttaaaatttctctcttttgtactctttccctttatttctcagactggctgacactcagggaaaatagaaaagaacctacatgaaatatcaggggtgaatttcccccgatatcacactggctcttctctcacctgtctacctgcttaacttaataggagaggcaatgcatggtgctcatgaacaaggcaagcattaaagtcagaccagactaacatttgactcagtcctaatattcaggtgagcttgggcaaatcgctcattaaccccaagtcttcatcattttgtgcatataatggggataactgtggcacccacctgtttttgtgagaatcaatgaaatattatgcttgatgttattgtgatcatgatactatctgacaagggcagtgatgcatgataacatcaaaaaattagaaactgtaatgaggtctcttgggcaaaattccatacaagcaaattactgtctctacaaagcatttctgccacacttaattcaccattccctgaacaaaatgtgccatcttcattgttcaggtctgtatagtgctggtttccctgcctgggcagctcactccatcccatcccagcccaatccccatccctccacctcccccttccctccccactctcatacaactcttccttatcttacaggacttggcttcaatgtcaccttaactggaagcttctctccctctccagaagagcttccgattgcacttgatgcatgcactattatttgatcatttttgagttacagtccaagtctttttgtacctgaataacatgttgcccagtcagtttctcttcctggattcagaagtctttcatggtaggtccagctagaagtgacaaaaagacatttaaaaaaaaaaaaagagggatgacacagacagacatcagcacttaaaagttttaaacgatatgtgaaaaacaaaatttaagggcttctaggagaaatgtaggagggaaggtgttactgggaaatatgatagaaggttaatttttattttattttatttttagagaaagggtcttgctctatcacctaggctggactgcagtggtgcaatcacagttaactgcagcctcaacctccagggcttgagcaatattcccatctaatttttattttgtttaagaaatgcagtcttgctcttagcaaagctaaagtgcaatggtgtgatcatagcttactgcagcctcaaccttctagactcaagtgatcctccagtcttagcctccccagtagctcggactacaggtgtgcactgcaacgtgtagctcatttttttttttaatttttagtagagacaaagtgtcactatgttgaccaggttggtggtgatctcctacactcaggcagttctctcacctcagccttccaaaatgctgggattacaggtgtgagctgccacacctggctgagggggttaatttttaattatataaagagctcaaagcaaatattagaaggagcctaaatgcctccagcagttgactggtactggtaaattgtgatacatccatataataaaatattatgcaaccataaaaaggattaagatagatcaataggtattggcacaaatgtccacgaaatatgaaaatatgaagtgatgttcaatcaccatgtacgtatcttgaaggatatggcccattttctcaactgcaattatttcctgagataagattatgggtctaaagagtgaaggacatttttcacttatttaaaagtatttatcatttttataatttaataaaagattaaacagatcattgaattagtaaaagacaaagtaactctataaataaatggaaaagacacagataccccaggcatggtggctcatgcttataataccagtactttgggagggggtggtggggggattgcttgaggccaggagttccagaccagcctaagaaacaaagcaagacctcctctctagtaaaaataaaaaaataaaaataattggccaggcatagtggcatgtgcctatagtcccaactactgaggtggaaggatcacctgagcctaggaggtcaaggctgcagtgagttgagactgtgccactacactgaagcctaggagacagagcgagacttcatctcaaaaaaaaaaaaaggacaataaagaaataaagctaataagctaacataaggaaagataaaatatgtgacaaataggctgggcacatggctcacagctgtaatcaagcactttgggaggccaaggcg

SEQ ID NO: 45404 - DNA, 2233 bp, Homo sapien
cgtttctactaaaaatacaaaaattaaccaggcatggtggcatatgcctgtaatcccagctactcaggaggctgaggcaggagaatcgcttgaacctgggaggcacaggttgcagtgagctgagatcacaccactgcactccagcctggtcgacagagcgagactgtgtctcaaaaatgaaaaaagaatgggtgacaaagtaataataggaggtctttcatttatcacacagaaaataacttgttaaattataatacctgtgtgggcgaaggtgcagtgaaatggccattttcttgtagtattagtggtgtttaaaatgtatataagccttccagcataaagcttggaaattttttttaaatcatacagacagtgactcattatactgcctcctccaactcctggcctcaagcaatcctcccacctcagcctcccaaagtgctggaattacaggctgacagccaccatgcctgaaagctttgcaatttacatcgagggtaataagaatgctcatgccctgtgactcacagtaatctcacttctggaaatttcacctttggatataattcaacctaaacaaaaggtcatatgcacaaacacagtgaaaatctgcgagtaatttttttctctttttttaaaaaaatatggaatgcttcacaaatttgcatgtcattctttcacagaggccgtgccaatctctctattgttccaactaaagtatgtgtgctactgaggcaagcatgagtaatttaagatagagtggttaagtgacataaggaagaattatggagaatttaaaaatctatgctatttataggcacctagtaacagctcagtaaatattagctgctactattattatttttatggtaatttcactcaattaaaaactgtcattaaaaattaccattgtcatggaacataatgtctcctactgtgtaattgtagaaacagatacaatttgtcccttggtatatggggggattagttccagctctcccatttctgtgtataccaaaatccacgcatactcaagttttcgaagtcagtcctgtggaatccacatataacacaaatgggaaaattagtgaggtgtggtgacaagcacctgtagtcccagctacttgtgaggctgaggcaggaggattgcttgagcccaggaggttgaggctgcagtgagccataattgcaccactgcactccagtctgggcaacacagtgagacagaaggttgactttttaatagaatttttctgttcacttgaagatatggtcaggattgtggcatatgaaaattcttcataaaataactatctaatccaattaatgctggaattgggaacagcagaagtgtcatctcagagctactcacaatgaaaggtgatgtctggggctcaggtgtgttgaggtccccatgcctggactatgggtgctgagtgggatttacttgtccatccattttctatattccagcactgggaaactagggacagtacttgttctcaagggaatcttcagcttaggtggctctgtaaaagagaaattacatcattgaaaaatcgtcgcaggtcaggtgaggtggctcatacctataatcccagcccactgggagactaaggcaggaggattccgtgaggccaggagttcaagaccagcctgagcaacacagtgaaacctcatctctacaaaaaattagaaaatgaactgggtgcggtaaaacattcgtatagtcccagctactctggaggctgaaataggaggatcgcttgagcccaggaagtggaagctgcagtgagctctgatctcaccactgcactctagccttggtgacagagtgagaccctgtctcaagacacacacaaacacacacacacacacacacacacacacacacacacacacacccaatctcactctgtccagccttgactaatcaaaagggccttctggttacagaagaggtatgctcttttgtaggacagggagagaccagcaagcttgttcacagacttttcctcatcctctgcttagttttccaagaaccctcacagtggaaatggagtctctgggaaaatgacctaaatctttgggttaccaggggagaaatatgcctcctttgtcaattaataaatggaacatcagccttaaaatccagggagttctgctagaatgaatcactccctaagaccctgaccaatgcatggaacatgaaaaactgaagtttaactgggcg

SEQ ID NO: 45405 - DNA, 4440 bp, Homo sapien
gatcacctgaggtcaaaagttctagatcagcctggccaacatggtgaaaccccgtctctactaaaaatacaaaaattagttgggcatggtggtggacacctgtaatcccagctacttgggaggctgaggcaggaaaatcgcttgaacccggaaggcggaggttgcagttacttctagaagaatttccattagccctttgaaatccttcaacattcatgaaggccaaagagttttcacctaatttaatctgatgggtatgtgaccagagtctttctagggaatagagactcccaaacagttcgactgggaagtgaggagagaatttattactcaaaaccaaagggaaatgaaaagaggccaacatagaatgtcattattctttcttggcggggaatggattccagagtcattctgtgacctttacatgacctccttattagcatctaaaagcttccagtgtaggatgcagccagctaggttctcttctaatgtaataaaatttgcttcggcaaatcttatgcagagccaactccaggctccagaaacaataggctataaattactggatctcccatttgatacaatgaagtatgagcacggtcctgaatgactcctctacatactactctgggtggcttgaagtgaatttgatacaagaactggagcgagggcaaagcagagctagatctaggattaatgtgcttgggcccagctcctcactactcacctatgagtctagttccagaacccaagtagaggatggggaaacaaggctcctgactttttttccctaatatctgcatctctttcacatttcttatctccttgcaaagaaactaaacagtctcaactgaaataactaaatgattaaaccctatacagagaatctccaaagactgacaaaatatcattcaagactgttacacagacaaccttgaggatgacttgatgtaccagtgatctacaatatttgggatcattccaaattcccatcaaggatctgcctatatcaacaaaggagccaaggaccaaccattcaaatgggccctgctgccaagcctttttttttttttttaacaatgccatctcttcatattgttccatttaacaaaactgcagcccttcatctatccttaagtcccttggccaatggtacagagccagagtatgctactccctagcaggaaatcaacaggatgacctactaaacaccattcagaagatgctaagacccatgaattgcaacaggaaagaaaagacagagaattagtcagacaggtacatgctgtgccaaaaatgcactacagcccccacccaattctgcctaatcctagctgggctgacaccaacctgatgagacaggcctataagatctcaaactaaaacagaaactcctgaactgggttcttttgagcccaggaagcagcagtaaatcattaaagaacagataagttcttaaggtgagggagagtttcagataaatggaatgctggtagaacacagggcccaaaggagcaaaagttaacctaagcccaggtagaaccttgtttactagagtattaggcatgggtttgggcaactattctaaccagagaaactggcttcagtgagggcaagttggcaatccaaggtatagcatgcatagggctggcaaaattcagggtgactgaagcaaaagcttcagaaccagaaagaccacatctgggggtagagcacaaaactctcaagagatgaatctttgtaagagtgaggcagaactatatagcagttttaggagatctgttggtgcccagcaagagctccaaacgggctatatgcagggatgcaggctgtagtctcaggagaggaggttcacaaaagtcattcagtccaagacctcaaactgtgttctctactaaaaggaatcaaggttccctagagaaacggctgactccatgtatggtgcagtatattgatcctggaacatcttttttgccagaaagcaaggaagccatcaaagtccaacaggatcacgtcaaaaagacatgaaagtcaacttgaagagataattattaacctagatgagacaatgtaagcatccaaaacaataaagactgcaatggcctgaaatacatcaaatgcaaacaataaactatgagttcataatggtattcagaaaaaaaaactactggtcattagagggaaggttactaggtcactaacttactactctgaaaagtgacttaagatgagaggtagggtggagaattagctatttattcagtctttcctgtacaaacataaatttttagggagattgaagcagatgaaacaaatctggaaaaatggaggtaactgcttaatctgcgggttgggtgcatggaggttcaacatatttcttttgtgtatatttgaaccccctacaaaaaaagcacaagacagaatgtgagccaagcagcttagggtttaggcaaggcttctgcctacaagagacaccaggatatgaggggtagttttagccctattgggctgagccaactggaggtatatagggaagtgctaaattgcagaggtatcatgttgcccagcacttgatcaaatcctagatcctaggtctgcttggtggcatgcttcctaggtagtggatctgaggctacctatagaacttcctttgcagtcatagttcactcagaaactacaaaagtgcttgctcttgaaaatggagtctttgtccatttcatgcttctataaaagaataccacagactgcataatttataaaaaggaaaaaaggaaggaaagaaaaaaggaaggaaggagggaaggagggaaaaagggaaggagggaaggaaaggaaggaagggaaagaaggaaaggaaggaagggaaagagagaaagagggaaggaggaagggagggaaggagggagggagggagagagggagggaggggaagggaagaaaagggaagagaagggaaaggaggaagaaaaggaaaggaaaggaataaattttatttcttaacagttctggatgttaggaagtccaaggttgaggggcctgcatctggtaagggtcttcttgctgcatcatcccactacagaaggcagaaggaaaagagagtgcaagaaagcaagagggcaaaaggggctgaactctgttttataataagcccactctgtgattactaatctattagcacaataacaacattaactcattcatgaaggctattttattaggccccacatcccaactgttgcattgaggattgagtttccagcacataaactttgggggacacatttaaaccatagcagagcacttaggttaattcaactaagaggagctgggaaaatcaaaggcatgagaaagacagcaaaagctagcagagagaaatgcataggttaaggaaaaaagtcacagtgaatcctgtagtgcaggctactttatcaaaagcacctaaaaaagatctcattaactcccccagctcacctccacccacatctaaagagccacacacagcaccaccaaaggcagcacaatgagaacagcattctcctcaacagacaagctgggagtatctagacacctgacctcaatagctccagaacagccctaaaacatttcctccctaaccaccactcaagtcaccagcttggaaagtattaagaaaacccaaatcctgacacaccactatgaaacaacttaaaacagcaaagaacaacccatttaaacagcaatgccagctgttggggaaaaaaggaacaatgagtagaggagaaacagaccactcggggtccaccaagacccagtctctcagcttcagcacttttaaatgcagaatccatacccctctggggcctgtggagctccacaaggcatgtcgtcctcaaagataaatgagcaggcaagctggctagaaaaccactaagggtatttattctttaaagaatctttacagggtcaaagaagaatgggtcttaactggctatgtgaactccccacagattctgaggatgatgtcagtatccctttccagatgtgtttaacactttgcagtcacttgtattcctgccactgagtgccagtgctttgctaatttgaactgattccagctcacgctgaccccagctccctggatgttaccattagccaagactgtcacccatactgtaccctttcaaagagtcctaaaaacagctcttcacctactcttccaagacaagtaaaaatgtctgccaaagaaatggggaaaaaagattcagagagtgaaaacaattaatatactaacaagagagcaaaaagcaaagggggaggagaaactaggaaaatcatatatgggctctcacctatttccaaagctgggctaatgtccttttgcttgtgtctgaataaggcaccaattttaagctgctaatgaaaaaaaaagaaaaagagaaagaagcaggcccaggctgggcg

SEQ ID NO: 45406 - DNA, 3627 bp, Homo sapien
cgcatctccactaaaaatacaaaaattagcctggtgtggtggtgggcacctgtaatcccagtgacttgggaggctaaggcaggagaatttcttgaacccaggaggcagaggttgcagtgaccagcaaggttgcgccattgcaccccagcctgggcgataagagtgaaaactccatctcaaaaaaaaaaaaaaaaaattcctttgggaaggccttctacataaaaatcttcaacatgagactggaaaaaagggtatgggatcatcaccggacctttggcttttacagctcgagctataagaacaaaaagaaaaagggatatcatttaaacacagtatgtagaaaagaataattattgaatctgtactggtctttaacttttacactttgatctttaattctgttattgtgattgagtccaaagaaaaacagtatgagtaaaataaaaagaacaccaaaaatgctaatattctgtttaccgaagtctgtagtgatatatcccattaaatccaagtgcagtgacacacccataatcccaagcactttgggaggctgaggcgggtgaatctcctgaagtcaggagttcaaggccagcctggccaacatggtgaaaccccaactctactacaaatacaaaaattaggcaggcgtggtggcagaggcctgtaatcccagctacttaggaggctgaggcagggagaattgcttgaacccaggaggtgagcttgccatgagctgagatcataccactgcactccagcgtgggtgacagaacaaaacttcaacctccaaaaaaaaaaaaacagctagcaggtgacatttgctatagggagactagggatatgatcttgctgcaatccttccattttagtaaatctaaacagtgtgaatccattctgtttcgtccccactccactccagagccaaaacaagaaaatcaattatatttctagttctttaaaaacatatctaactaaatcatctaattaaaagataatatgcatggttccatactctaaaagaaaacttatgtcctgcatatcatggacatttgatgaatgcttattcagttgactggtgtagacttcaataataacctgttcaatgcattatgccagatgaatcttgcatctcaaaagtagaacaaatattgttctttcagttttgtctacccataaatgcaatatttactaataaaaagaaaatgagtttattgttctagagagtatgagaattttgacaacatgaattctcctgtcctaggacataattaatacttagaggcatactatttcatgtggaagctaccattaaatcaatgttaagtgttaattacctcacataatcttctaatctgacttgactgaagacgtacctgacaaagttgatttatcaagttgtaaatcttcacctgttgaattcataagttcatgtctgaaaggtgagaataaatacttaatattcactaggcaatttcagcaaagtaatatccactagtacatatttaacatttcatcatgaactgcgggtgtgaagagaaaagacaggctgggcacagtggctcacacctgtaatcccagcagtttgggaggccgaggcaggcagatcatgaagtcaggagttcgagaccagcctggccaacatggtaaaaccccgtctgtactaaaagtacaataattagctgggcatggtggcaggcacctgtaatcccagcgactcaggaggctgaggcaggagaattgcctgaacccaggaggtggaggttgcagaaaccattatcacgccactgcattccagcctgggcaagagagcaagattctgtctccatcaatcaatcaataaaaatataaggaggaagcatttactgtgtatttatatgtctggtattatgtgaagcactttactatcttatcaaatcttcgggacaggtcttcagttctcatgaccacaaaagaggatactaaagctcagacaggagaagagacgtggccagcctgtgtccccagggcctatggtcttaccactaggttacagtgtttccagatatcacatgttgtgagatttttgctttaaaatgaaccaaaaaaaaaccaaaggtgaaaaaggcataagctattaaaaagtgggagaaacactaagagaaccttaagcatgtaactaaaaatattatggaaatgttattgaattcattagcaaatttagtgctaggttttcattgaggagtaggttatattactcatgatgaagaaaaatgttccttttaagtatattaacataaataccatcaatattgtttatcatgtttaaatgttcacttaaagcaattcagttaaaattctgcatatcatacaattttatagtttgctagtaggttacaagtaaatagtcacccaaataaaaacatcatgttttccactggttgttgctcttttttaggtgagtatttgatgtataccaacagagagaggataataacaaatcgctaatttctttcatcactatataaaggtggcttcaggatagaatagtatcagggcaatgatgaatttgaaatctaacatcaattcagtgatgcatcaagataaaagcagagacaacaggggcaccttggtgagtactgaacattttatttatttacttatttattttgagatggagttttgctctttttgcccaggctagagtgcaatggtgccaacctcgcctcactgcaacctctgcctcctgggttcaagcgattctcctgccttggcctcccgaatagctgggattacagacatgcgccaccacacccgtctaattttgtatttttagtagagacggggtttctccatgttggtcaggctggtctcgaactcccgacctagatatctgcctgccttggcctcccaaagtgctgggattacaggtgtgagccaccgcgcccagatgaattccaaatttaacaaagcagactaagagaaacaattcatttaaaaaaataatatttggccaggcatggtggctcacacctataatcccagcactttgggaggctgaggtgagtggatcaggaggtcagcagttcaagaccagcctagccaagatcatgaaaccccgtctctactaaaaatacaaaaatcagccaggcgtggtggctggtgcctgtaatcctagctgctcgggaggctgaggcagagaactgcttgaacccgggaggcggaggttgcagtgagccgagatcgtgccactgcactccagcctgggcgacagagtgaggctccgtctcaaaaaaaataaataaataattcaatgaaattcctaagatccagggctttgcaataaatatgtaaataaatttccaatctccatactgaaagtttaaaagaaatgctaactaataactaaagaaatacaacttttcctcagctttgcagcaatctagaaacaaagtgtgtagacactacaaagcaccttacaaggagaaacatgtaaggatggcatgactcgccggcagccctgggcttgtccacggtacccccatgatgaacagtaactccactgtgtaaacgcccatgaacataagattacaagacttttccagtttagacataccatattttctttcagacaattcttcagtttgttta

SEQ ID NO: 45407 - DNA, 1025 bp, Homo sapien
cgggtgcagtggtgcaggcctgtaatcccagcactttggcagcagaggcaggtggatcactttgagctcagggcaacatagccaaaacccccctccccagccccacccccaccccgtccctaccaaaaatacaaaacagcagggcatggtggcgggcgcctgtagtcccagctactcaggaggctgaggcaggagaatcacctgaacccaggaggcagacattgcagtgagccaagatcacaccactgccagcctggatgacagagcaagactccacctcaaaaaaaacaaaaacaaaaacacaaggttaagagggacccccgaccttacagatgcaagtttaagagggacccctaagcaaaaaatgccaaccctttttctcccaatcattgaaacaccaggagggtgtaacagttttgcagcctagctgtagcaggctgatgcccccaagatgcccatatcctaatcccgggaactggtgaacatgaccttatatggcaaaaggagctttgcagatataatgaagttaagggtctttggcttttggggttgatgtactcactcggatccttgtaagagcagagcaggtgatggagagggtgggaggtgtagtgacagaagcaggaaactccagtcattcgagacgggcagcacaggctgaggagtgcaggccacctctacggccaggaaacagattctcccgcagagcctcggaagctaccgaccctgctcccaccttgactcagtaggacttactgtagaattctggccttcagacctgtaagggaatacattttggttgttttaagtcactaagtgtgtggtaatttgttgcagcagccacaggaaactagtattgtagtgaagcctcaaaacccccctgaaggggctgggctcagtggctcatgcctgtaatcccagcactttgggaggccgagatgggtggatcacttgaggtcaggagttcgagaccagcccagccaacatggtgaaatgccatctatacaaaaaatacaaaaactagc

SEQ ID NO: 45408 - DNA, 1365 bp, Homo sapien
cggcccttgcagcaagtgaaaagcctattattgattccctccctagccatgtagacagtgaaccaagacactcatatcaggtaaatgccttgttctctgttaccaaggtaaccagtaggcattcccagatacagcgaaggtcctcacaccaagatatgcacctggccacctgaggaaagagaaaggactatctgaggggatggggctgagctgggtgtggagtggtccttgtgggtcttggagagtgggagggggagcagcatgagccaggcctcgaggcagaaggacaaccaggagacagcctggaaaaagtgctggacccacaagggctctaggctggccagaggggaggtgggataggctgtaaagtcctgaggtctgaagattggccctggcaggaagaaaccaggtaaggtggggtgttacctacaccctcggggccagatgcaggccagagccagccaattaccaggcccttagggaggtgtgagccccttgaaacgatgcaaggttttttgtttttgttttggagacggagtttcgctcttgtcacacaggctggcacctttgcccagagcaggcaccaagacttctggctctgggtgtgacctcagtctgggtaaaagccccagcccccaccagcaccacctatcccctagactacttcaggtgctgagcccaagccaggggcaggaagctaaactgatacctagggtaatcccaacaaagtccctggttccccgcagctatggggctgacggggaattacagcccaaaccccagatgctggctctcaaactaacactgagccctcagtgcccacagggagatacaatcagcgcactttccagatggggaaatgggatcagagaagtgcaacagccttgcccaatgccccagaccagggctccaggcccagagtgttcttttgtcactgtgttcagagggcagcagctgctgtgatgtacccacctgagcctggcagctttctccaactttggaagcccaggagcatggcccctgtccacagatgcacctggcatgaggcgtgcccagagggacagaggcagatgagttgcgtctcctccactggattgtgagggcctagaaggagacaagggtctgcttgagaaggcagtgaacagcgagcagcctgaggcagtgcccctctggatggatgcgcagtgcctggatggaacctggctcagacagagctcagttctgcaggtccctgaggcatggagagttcacagctaccaagtgtaggagtctggattcaaagccaacggcgtgactccaaagtccctgccctagcccctggaccacccttgcaggcccatcagatgcccaggccagcagcacagc

SEQ ID NO: 45409 - DNA, 1058 bp, Homo sapien
cgttagaatgctaaagaccataaacatataacaacttaaagtacatataaattcaatatatatccaatcattgtaactatgacacagtagaatattaaaatactattttcaaaatgtatacaagcttaatgttctatgtattcaaactgtttattcaaaatacaaatcatcaacataaattgccactaatattcagtcccttcacaggacatgattcactgggagttaataaattagcagccggcaggcagtgacacaccgcaaaaatgaaaaccaagaggtgaaatagttctgaaataaaggttttaaagctaacagaaatcactgaattactaagtcattagcactaattttgagccaactaactaattaatatgagatgatacaatgtcctatactttggtaaatacagactatgtttaaacaatgtctgtaacgtgacttgtaaaatgctcctggctttacaaagatgtgattaagatgtagtaacacatgctaaaccatttccccctgcagagcatgtggtaactttcatcagtcacattgagagtccagaagataaaggaaaaggtcatggatttcgctgagaacttaccagagttgaactccctcattttccgttccccagcattggcgggttctgggactggtggctgtggtggctcgttggtctttgtctcttagaaggtggggaataatcatcatcttgaaaaagaaaaaatggtcattactgaaggaaccatcttaggttacagccacctctgggtcaattcccaacattcaaaagctgagcagggctttaaagctatcttattaataattatttctgtattgcgaacttcagcatacttttttctagttacatttgaaatgttattcttttgggatgtgctcaagtgagtactgctttttcctctgccttgcttcattactttttagtttccttcatttgaatcatcattgtaagtctccccttctcctcaaataactttcaaattgctgccaagaactatgttctatcttaaggcttttgagaaaaaactttcaatgaagatagc

SEQ ID NO: 45410 - DNA, 1285 bp, Homo sapien
cgtcagtagtttgagaccagcctgggcaacatgttgtaaccccatctctactaaaaatatattttaaaaattagctgggcatggtggtgggcacctgtaatcccagcttctcaggaggctgaggcaggagaaccacttgaacctgggaggtggaggttgcagtgagcggagatcacgccactgcactctagcctgggtgacaatagaaagactccatctcaaaaacaaaacaaaacaaaacaaaacaaaaaaccactaaaaaaaagactccatttcaaaaacaaaactaaaaccaaaaacacaacacaaatgtagtacacaaatgaaaataattactgtgttaaacacagtttcatagaaaataaaagaccaatcaaatacaataagctgcctttttagatgggtatgttattcttctttcacagctaaagaaacaggctcagagaatgttatttgattggaccgtgttgcatttctggacagtgcagctgagatcagactttgtgtgtaactccactagcctaccagggtgcctctcataaagctaagaaatgtaaatttggcctaatatacaaagttgccagggcagcactgggtcaattctacatacagtacttctatgttcatcaagggaaaccttaagggaaagtgaaaatgcttctagaaggcgactggacaccagcgcctttgcttgttgcctttgggctcttcttctaaggccaacagtgacctgaaattattgactggcttttcaatcaagtggacaaaatggtaccaaggtcggcaacatcagacaaatttacttgagggccttatctatgcgctttgaaagacaaaactgcttttgtaaaggacactgtatttcagaaaaacataatcatattaacaaataataacactgtaaaatgctgatgtgttgaatgctactttagaaaaacatgctcaaatctagggaaaaaatttgatacaaaactacgtatcaattatctagctagctatctatctagagacatgctttcattctattgctcaggatgggaagcagtgggattatcatagctcactgcagccttgagctcctggcctcaagtgatcctcctgcctcagtctcctaactagctagggccacaggtggacacagttatgcctgggtttttgtttgtttgttttgtagagacagggtgtcactacattgcccaggctggtgtcaaactttggagtctcgctgtgtcgcccaggctggggtgcagtggtgtgatcttggcccagtgcaacctctgcctcc

SEQ ID NO: 45411 - DNA, 3067 bp, Homo sapien
ggagaatcgctcagctgcagcctcgacctccaggggcaatccatttcagcctcccaaagtgctgagattacaggaatgagccatcgtgcctggctttacactatattttaacactttttttgaaaatggaaacttttacaggcaattcacttccttcaaactaatgataaggaagtgatgctgttctgttctgttttgttttttgtttttgtgggttttttttcttttttgagatggggtcttgcccaggttggagtgaggtggtgcaaacaaggctcactgcagccttgaccttcgggctcaaggaatccttccccgtcagcctccccggtagctaggactacaggtgcatgctaccacgcttggctaattctttttttgaaatggagtctcactctgtctcccaggctggagtgcagtggtgcaatctcggctcactgcaggctggtctcaacctctgacttcggatggtccacccacttctgcatcccaaagtgctgggattacaagtgtgacccaccgcgcctggcgattttgctcattttagatactagaactttttaatttaaaatttttttttcctgagatggagtcttactttgtctccaggctggagtgtagtcgcgtaatctcggctcactgcaacctccacctcctgagttcaagcgattctcctgcctcagcctgccagagttgctgggactacaggtgtgcaccaccacacccaggagttcaaggctgcagtgagccatgatcgtaccactgcactccagcctgggcaacacagcgagaccctgactccacaaataaataaatcaacgtcatatgatctgtaccagggtataggcaggtgctatgatccccacttttcatcctcaactctaagttgagtcatacatcaacctctagtaaaaagtggcatgctctcagtcaaaggggtaagcccaaaccacgtggagagaatcttatctcttttgagagctaatataaaaagaattcctcctaggcataaaaatattatgacaccagttacttaggctaaacatgcctattatgctaagtgagttattaacaataaatactttaactctgtgccatgttaattatcataatctgatttataatttgttttaaccttaggttatatataccttgaagccatttatattttggtatacttgtaataattactatacactggactatgtatattggactaaacacggagagtcaaaaaagagtatgtggtcagagtagaaatcatgccctagcttccttcgtgtctacctcctaccttgagtagaagtggtagaaaaagtaattacctaagattttttggattctggtttgtggagaagcacccttatatttaggctgatgggcggcaaaattagaaagtattttttgtgatttagaattttatacagagatgttcattgtgattaattattctttgtattagcagatttttgctttttatagctgcatgatttcttgtttattattcattcattattgtctattaataaagaaaaactttatttcactgaagcagtgatatataatccaacttggatttttaaataatgactgactttttttctttgggaatacattactgttaaaaatgtaattattagatacattacttttaatgaatataagtggtataattagaaggctgaaaagaatccttggaaacgtgagtttaatttgatagctaagaaactgaggacaagatacttattctttgtagcatattttctaatgtcatttcattgtctcaccaagaaatacttgcataaagcaagttcaattacagtatctgttgaatatttaaggttgagtaaagtgggtgagtttaacagatattttcccttatttcttttaggcaaatctggattgggaaagttgacattaatcaactcattattcctcacagatttgtattctccagagtatccaggtccttctcagagaattaaaaagcctgtacaggtctagatattggtatttttaattgatgataagctggaataatattaatacacacaaagcacgtgttgtaactttcattatgcttccttagaggtaagatgcaaatttgcccttagccagtgtaagatggtaaatatgacttcataaaatcaaaaaaacagaagaagtacagttaatcgaaagattatcttgactagaactttccaaatttgtcctaaggattctcctagagatgacactgtgacatagtaaccaattcccctggagttgtgctatgtagtatgatagtcatttgccacatgtttaaatcaattaaaattaattaaattaaaatgcaatttctcatttgctccagatacatttcaagtgctcaacagccacatgtggcaagtggctgccattttgtgcagcacatatatgaagattttcatcattgtagaaaattgcattggacagtgtagagaaaacatgattcatagaaaaactattgttatttaaatacagtgttctatattagtcagtgggataataccatatcatagttgaatggcaatagcaattctgtaagactcccaagctatatgtgatctaatttactgcttctcagtctttgctatgcattccaatcctgggtatcctgttaaatttatttcttctagtagttctgagatgggctgcctttctacatttctaacaagatcccaggtgatgctgatgctgctggatggtagatcacactttataaagcaaggggctagactctagatatgcactttttattaaatagtacagcagcctgtagccacatgtggctattaatctttgaaatgtgggtagtctgaattgtgatgttctgcaaacataaaatatgccacagatttctaagactgagcatggaaaagaaaatctccataattttttatattgattgtatactgcagtgataatattttggatgtatcaggttaaataaaattgactgatttcacctttttcctattttaaaagtggctactaagaaaattttaaattacttacatgaccgacatggtatttttatttggcagcg

SEQ ID NO: 45412 - DNA, 1434 bp, Homo sapien
cgctacctgcatgtgaatccctgggagaccccacagcccatgtctctgagtaaaactggatccaggaagccctttgctttcagtggtcctccctggaacttctgcactctgcaagctggagttgaacatctgcgactcagcctctcagtgcacagggtatgtggggctcgacttctagacctggccctgacgagtgcttttgttagcctgagcccttctgctcagttccgcctatactatcgctgcccaggcttagctgcttttggtaagcctcatgcacattttagagtctgtgaattgcatctgcctcttatttctctgaaaatggagtttttcatcccttccttccaattctccttccagcctttcttgatttccagaatgagaaatcattaagtcatatactgagccacaaataacattataaatgtgacaattacatgataatctttggggggaaaacattctgtgatttctaacatatttacataaaaatatcttacactaaaacacaccagttgagggcactggccagagataagattaggttaaggccaagcaaagctgagaagaccattgttaaaatttcaatcctgttcctttatcttttcaaattaactgaatattgttattaaatttcttgttttagtgtcgaatagcaccttttccctgcctcactttagaatcaatttagagacaaaggattcaggccaactgaggtcatcagcattatcgctaataatagctggactggcggatgcgattcagattcacacaacaatggatttcctaatctgaatcctagactgagatgaagccagccagccgtaagcattgcttaataaccaaagcctccccagataggcttcttgccctacagcactgaagacatgaaagaaacagaccaaaatgtacaaatatcttttattcctcaaaggaaaaagaagagttacacatgcctgtttctcaccaataagaggggtcagggcagagtgagtctgggagagagagttctaccaccacggttcccaaagcatcgtctaggggcctgttaggggagcccgaggtctaaactatttccacagtttcactaagataagattttccttttccatcctcacattcgttagtgtgcagtgaagtgctccagaggccccagcatgctacattacagaagactgaactcaggagagatgaggaataatcccctccatcacaccagacaccaggagggtgtgccaaggtgtgagacatacagtccttactctttttttgttttgttttgttttgtgagacggagtttcacttttgtcccccaggctggagtgcaatggcccgatctcggctcactgcaacctctgcttcctgggttcaagcgattctccagcctcagcttcccgagcagctggcattacaggtgcatgccaccatgcc

SEQ ID NO: 45413 - DNA, 3478 bp, Homo sapien
cccctcctacagctcacaagttgctcaagcagtggtctgtgagaagtgattctatttttggggttgtcccttttctctgcttttcttgggaaccattttgactctgtcaaatgttcactgacttctagcactggcagaaagaacgtctgcttttttatctgaaactgaactgttacacaacttataattttattttggtaaaagcattcttagttgctgtgtttagtcatactctacaaattatcttgttggtaggataaatatggtgagaattaaagaaaaatgaagatggtagtggacatttgcagactattatcaataccggcatttcaaacttccaatataattcggatacttgcctggaggacaaactttttttggcatgccgtataatgaggagccttatattcccagtgtgctcaaactgccctgacaccacctatccaccgtcgtcagcaatctatgttcaatgtttcttaaaaacatcagttacaaggtcaaatttaattcaactgaggtcagactctcaggggagctgaggagcacttccttcaatggaaatggccatttctgagtggtgacaacactgtcatttcttggaccttctttaacaaatctgttctcaggagcattaacatactttgctaatacattttaatctggcatttttatgggggtaattataggaaatgcctggaattaaatagcctacaaccaattcttggatcaacaactaggaaaactgaaaaatatatatgtaaatatatctttttctgtgtaagaaaagtcctgctaacttaggaaattagaggatatctttgtgtagaatctttttataaagtggaaataggccaggcatggtggctaacgcctgcaatcccagcactttgggaggccgaggcagccagatcacctgaggtcaggagttcaagaccagcctgacccatatggcaaaaccccctctctactaaaaatacaaaaattagccaggtgtggtggcaggtgcctgaaatcccagctactcgggaagctgaggcaggagaatcacttgaacccggggggcggagattgcagtgggccaagattacaccactgcactccagcctgggcgacaaagcgactctgtctcagaaaaatacaaaataaaaaaataaagtggaaataacttcctctgcttctaactatgcagtttgcttggaaaaaaaaaaaaaagtaacctgtaggtgtagtacaactatcagcacaaatgtaattatcttagagtatcttaatagttcctacttcaagtagaacttatgaaggagtttaactgtggtaaaaaaaaaaataattggagtaacttagaaaacatttatatatacaatagttggtttgtatgctcagtcactcattcattttaggaataacaagtgcctactacttgccaggtgcttgggatatagcagggcctactgaataaattattatacaacagtaaattagcattggattgtgttgcttaaaacaacactcaccagagcaaacaaaagcctgattagcaatatgatctgaaattttaaaaacagcccttttcaacagttccatctaatttgccaggtcattattttataatgtcatatgggattgctgggtcaaatagtatttctggttctagatccttgaggaatcaccacactgtcttccacaatggttgaacttatactcccaccaacagtgtaaaagcattcctatttctccatgtcctctccagcatctgttgtttcctgactttttaatgatagccattctaactggtgtgagatgatatctcattgtggtttttatttgcatttctctaatgaccagagatgagctttttttcatgtttgttggctgcataaatttcttcttttgagaagtgtctgttcatatcctttacccactttttgatggggttgtttttttcttgtaaatttgtttaagttctttgtagattctggatgttagccctttgtcagatggatagattgcaaaaattttctcccattctgtaggttgcctcttcgctctgatgatagtttcttttgctatgcagaagctctttagtttaattagatcccatttgtcaattttggcttttgttgccattgctttcggtgttttagacatcaagtctttgcccgtgcctatgtcctgaatggtattgcctagcttttcttgtagggtttttatggttttaggtcttatgtttaagtctttaatccatcttgagttaatttttgtataaaggtgtaaggaagtggtccagtttcagttttttgcatatggctagccagttttcccaacaccatttattaaatagggaaccctttccccattgcttgtttttctcaggtttgtgaaagatcagatggttgtagatgtgtggcgttatttctgaggcctctgttctgttccattggtctatatatctgttttggtgccagtatcatgctgttttggttactgtagccttgtaatatagtctgaagtcaggtagtatgatgaaaagattataaatcattctactataaagacacacgcacacgtatgtttattgcagcactgttcacaatagcaaagacttggaaccaacccaaatgcccatcagtgatagactggataaagaaaatgtggcacatatacaccatggaatactatgcagtcataaaaaaggatgagttcatgtcctttgcaaggacgtggatgaagctggaaaccattattctcagcaaactaacacgagaacagaaaaccaaacaccacatgttcttattcataagtgggagccgaacaatgagaacacatgggcacagggaggggaacatcacacaccagggcctgtcggggggtggggggctaggggacggatagcattaggagaaatacctaatgtagatgacgggttgatgggtgcagcaaaccaccatggcatgtgtatacctatgtaacaaacctgcacattgagcatatgtataccagaacttaaaagtataatttaaaaaattttttaaaaagtcatatgatgcatttaagaaagtcacttaatttacatcagaggaaaatcaaagtttatagacttaggaaataaagtcgtaatgaagaagctcttcacggctgtcaggacagctacgtttttggtctctgtccttgattccattgtgaccttcagcccatctctctgggccccattttcttgtctttacctcttgggtcataaatggatctccatgcagctgatatccctctgcctaaatcctcctcaaaagaaaatcaaaatagtggctaacacagagtacagactgttccaagagcttcctatgatggaactaatctaatctttataacagtgctctgaggtagatgctaaaatctaccagatactatggatgagatgatgaagtcatatgcttgagatccctgagtaaataaataagaaagagacagaattccaacagcg

SEQ ID NO: 45414 - DNA, 1558 bp, Homo sapien
gaaaacacagggcacaaacgcacttgtataaaacacagagtttccataaacttaaaacatgtctgaatgatggagctaacagcccttaactccccacacccaggctgcaccacagcatatgtcacccccttgcttgcaaatgtgcccaaaaggcaatgacattccaagtttcctctgacaagcccaaggacagggcatgagttttccaagttcctttccattcaagaaaaggaagagaagagaatagagaagaatcaacaaaacaactccaaatagaagtaaacgagagccaagaacggaactatttctcataattaaaccccaatttctataaattacaatcctcattctagtgatgacctataataagatttgcattttcctctgatggtatttcccttaagagatggataacaaggtcttaatcttcatctcccagaccactctagggttctaagcacaggctttacagaaatgtgctgttatgggccatcatcttcaaatcatttccacacaagtctaggaaaataagacaggctaggataagcctccagtttttaaaattgctaatcaagggcatcagttcttaactatattgctgtaagatatgtcacaaaacttttgttaccagtaagaaaaatgaccaacatttgtgaatgatttaatttttaataattattaaagtactacactacacataataaaaaataatacatactcataaactcaacttccctgagttgccagtaggaagcaaccctgccgagcccttgattttggatttctggcctccagaattgtgaggacatacatttctgtggttttaagccaccgagtttgtggttatggaatcccagaaaatgaataaaattatctatcttttcaagctacttcagtttgatattgattatgaaaggtacatatatgctatcaaacagaagagactttagggagaaaaaatctcgcataaatgcaacaagttgccatgactctaagtgccaaggtcatataacatgcagactgtgataatttcaccaaaaccaaaacaaagtggaacaaatcctcagacacagttgctgataattcccaccctggcctcctctgacatttcctttcgatcaatttggctgcacctcttctgtcaagcaggagctggacgacattttggtcagctcctccccagaagggagctacaatctctgctctaacaatccccagttgttgtcttaagtcacactgtgttcatcaatggctacctactaaacttagctttttatctgtacattttccaatcaggtcgtattattttctcctggtaggcaaatgtttacgtttatccattttcctgatataaagctacttcgtatcagtgtgttattagtctctaattataagaagataatccagaagagaaagtccagtcaattttatataagttaaaaaaaagatgtgaaacctattttcagaattaacatttccttcctaaacatctaacacgacacacttacggactcttaacacacccttattacatgaaggagcagcagagcagagggcg

SEQ ID NO: 45415 - DNA, 2331 bp, Homo sapien
cgtgccacttggaccaccacactccctacctgcaccatcttacctggacagactaaatctcagccacctcatgactaggatattaacatggcttccagttctataaattcctcccccttaagaatgcatgtctgtaaaatcagaaatgatgaaaactggactcgtgagtggctttgtagtagggattacaggtccagaatagaataggttcagtaacatatttaagatatttaagggaaaaaatataagccaaagatttaacatctaaatagtgactatcaagggtaaaagtcacacatattttttatgagtacacacaaacacaggaagtacggtgaccaggagctgagggatgacccactaaagaataagctccggaaaccaaaatgactagaggcagatgcaaaggtgagctgcaggtggtctgtatttatctgtggagctgctggcacatgacggtgataaaagtgcagcatgccatggttaccagcttggacaatgcagacaaagaacaaccaccagagaagtggtaggggcgggcagaagatgtgcaggggccaactgggactggggtgtccatcagctaactgcagtatcaggtactatggggagccaaccaaagaaactaagtgtttgctataaaggcattaggataaaagtggaaaaaaaagaggaagaaagccctcttaaataccaaaagggtaaaagcaaataaaatagaacaaggtggttccctgttatctgtgatgtaaaaaatggacttggctcacctattaaatggaaaacagtcttggattggctcacaaagcaaaatcaaacaccatactgcatataagatatacagctataaaaggctgggaaaatatatagagaatttataggactcagaaaaaaagtaactgtcacaggaaactttatagcattaaatacctatatcaatacaaatttaaataataaaaataaattatttaaacatataactgaaaaagccagaaaaagaataagtgaaccaaaagaaaggggtgaattattacaaataaaagcagatattattaagtagaaaaagaatagaactaagaagtaaatccaaaagctggctctcaagagaaaataatcaaccaaaacaaaccactaggtatctgattagaaaaaaaaaaaaataagaaagttacaagtgctaacagaagaaaatttaaacattgtaaaagataaggaaaagaaagagatagagagaaaaacgtgtagattaaaagagactttaaaaacatatcaaattttaagaataaaacaacactaaactatagtgtctagggatatacacttggtgataaaactataaagattagggaaatgattaccataagagtttgggaagtggttatttttggggagaggaagtaggttataatagaaatgggacatgtggtgggcgcttctgggatgattgataaagttctattccttgacctgggtgtggttacaaggatgtttcctttataaaaatgaagaaaaacattaaaaaatcattacaggcaactttataaaactctttgcagtaagttagaagtagatgaaacattttttaaaaatattaaatttaatgctattccaatacaaaatcaagtttttttcttagagctaaacaagttaattataaaatgcatttaagaacaagaagaaactatcctaaaattcatatggaatgaaaagagagcccaaatagccaaagcaatcctaagcaaaaagaacaaagccagaggcatcacactactcaacttcaaactatactatacagccccagtaaccaaaacagcttctgtactggtacaaaaacagactcatagaccaatgaacagaacagaaaactcagaaataaagccacacacctacaaccatccaatctttgacaaggccagcaaaagcagcagtggaaaaagaccatactattcaatatatggtgttggaataactggctagccacatacagaagactgaagccagacccctacctttcaccatatacaaaaattaactcaaaatatattaaagatttcaatgtaagacctcaaactgtaagatcctggaagataacctaggaaatactcttcttgacgttggccttggcaaagaatttttggctaagttcccaaaaacgattgcaacaaaacaaaattggcaagtagaatttaactaaatgaaagagcttctgcacagcaagagaaacgtttgacagagaatacagacaacctactgaatgagagaaactatttgcaaactatgcatctgacaaaggcctaatatccagaatctacagggaacttatgcaaaaaa

SEQ ID NO: 45416 - DNA, 2725 bp, Homo sapien
cgccctgtctacactacctgcctggccagtagatccacgctatctacactacctgcctggccagcagatccaccctgtcaacactacctgcttgtccagcaggtccacactgtctacactacctgcctgtccagcaggtgcaccctatctacactacctgactgtccagcagatccaccctgtctacactacctgcctgtccaaaagatccaccctgtctatattacctgcctatacagcagaactaccctgtctacactaccagcctccccagcagatccaccctgtctatactacctgcctggccagtagatgcatcctgtcttcactacctgcttgtccagcaggtccaccatgtctacactgcctgcctggccagcagatccaccctgtctacactacctgcttgtccagcaggtccaccctgtctacactacctgcctgcaaagcagatccaccctgtctacactacctggctggccagtagatccacgctatctacactaccttcctgtccagcagatccaacctgtctatactacctgcctgtcgagcagatccaccctgtctatactacctgcctgtccagcaggtccaccctgtctacactacctgcgtgcccagctgatccgccctgtctacactacctgcttgtcgagcagatctgccctgtctacactacctgcctgtccagcagatccaccctgtctatactccgtacctggccagcagatccacgctatctacactacctgcctgtccagcagatccacactgtctacactacttgcctgtccagcagatccactctgtctacactaactgcctgcccagcagatccaccctgtctatactacttgcctggccagtagatccacgctatctacattcccttcctgtccagcagagccaccctgtctatactacctgcctttcgagccaatccaccctgtctatactacctgcctatccagcaggtccacgctgtctacactacctgcttgcccagaagatccacactgtctacactacctgcctggccagtagatccacggtatctacactacctccctggccagcagattcacccagtctacactaactgcttgtccagcaggtccaccctgtctacactacgtgcctgccagcagatccaagctgtctacactacctgcctggccagtagatccatgctatctccactacctgcctatccaactgatccaccctctctttactaccttcctgtccggcagattgaccctctctactctacctgcctggccagcagatccacgctatctacactacctgacttaccagatccaccctgtctacactacatgcttgtccagcaggtccaccctgtctacactacctgcctctccagaagatccaccctgtctatactacctgcctatccagcatatctaccctgtctacactacctacctgcccagcagatccaccctgtcttcactacctacctagcgagcagatccaccctgtctactctacctgcttgtccagcaggtccaccctgtctacactacctgcctgtccagcaaatccactctgtctacactacctggctgtccagcagatccaccctgtctacactacctgcctatccagcagatccaccctgtctatactacctgcctgtctagcagatccaccctgtctatactacctgcccatccagcaggtccaccctgtctacactacctccctgccgagtagatccaccctgtctacactacctgcctggccagaagatccaccctgtctacactaccttccttgccagtaatgcacgctatctacactacctgcctggctagcagatccacgctgtctatactacctccctgtccagtagacccaccctgtctatactacctccctggccagcagatccaccctgtctatactacctgcctggccagcagatccaccctgtctatactacctgactggccagcagatccaccctgtctacactacctgcctgcccagaagatgcgccatgtctacactacctgcttgtccagcagatccaccctgtctacactagctgcctgtccagcatgtccaccctatctacactacctgcctgtccagcagatccaccctgtctatactacctgcctatccagcagatctaccctgtctacactacctgcctgctcagcagatccaccctgtctatactaactgcctggccagcagatccacgctatctacactacctgcctggcgagcagatccaccctgtctacactacctgcttgcccagcaggtccaccctatctacactacctgcctgcccagcagatccgccctgtctgtactacctgcctggccagcagatccaccctgtctacactacctgcctgcccagcagatccaccctgtccatactacctgcctggccagtagattcacgctatctactctacctgtatggccagcagatccactctgtctatactacctgcctgtcaagcaggtccaccctgtctacactacctacctggccagtagatccacactatctacactacctgcctgtccagcagatccaccctgtctatactacctaactgtcgagcagatgcaccctgtctatactacctgcctatcctgcaggtccaccttgtctacactacctgcctgcccagcagatccaccctgtctacactacctgcctgtccagcagacc

SEQ ID NO: 45417 - DNA, 2618 bp, Homo sapien
cggcctgtccagcagatccactctgtctatactacctgcctgtccagcagatccatcctgtctacactacctgcctacccaacagatccaccctgtctacactacctgcctggccagtagatccatgctatctacactacctgcctggccggcagatccactctgtctacactgcctgcttgtccagcaggtccaccctgtctacactacctgcctgcccagcagatccaccctgtctacactacctgcctggccagtagatccacgctatctatactacctggctggccagcagatccaccctgtctatactacctgcctgtccagcagatccaccctgtctctaatacctgcctgtccagcaacattagtccttaaaaaaagcaaacacacaaaatcagtgtctatttacaacagccaaatattatgactacgatttgaaataaatttgtagacccatgtaaataaattttaaaactcaatgaggatataaaaatgacatgaataaagcctgaaaatcatattattagaatggaggacatagtgacataaaacctcagtgactgtagactcagggcaacctagacttaaaagtcccatgtggtcttttacatgtaaaaaatgagaattagtctaaaagtcaattttgtctaaattttgatttttggtgagtatacagtcaaaatagttgtgaaaagaaaaaaataaagttgtcaaatttcatgtaacctatgttatttggaaatttaaaataagttatataaatatttataacaatgttaaacaatttcataagtggactgaataaaacataatattttatcatatacaatagctcctgccttcctgaggaaaacataaaatcaaagggcgtgaaggaaggattttggtttcactgcagaaacataataagacaccgaagtgtgtgtttgtgtgtgcgtacatatatttaaactacagaatataaaatagcatctaatatacatcaaaaatgagtttcatagaaaaattcattttacatatatgtctataaaataataaaatttattcagcctcacaattactttgtgaactggaaataacaatgagttgtcattttatccaaatctaaaaaaaaacatacatacagtatcaagttctggttaaagtagtagatgtactttacgtggtacataagagtatctatacagtttgtgggctgcatcttgctagaatatattacattataaaatgcaccatttatttactctgcgatcaaacccccaacttgccccaagtggaggaaccctcagacatttgcagaggagtcagtgtgctagtaagcagcattctttacaaatctatgaacatcaaggtctccttggaacagatgctctgtgaacaatttataaaactccctcctgttagacacttaggttgattccatttttaaatcaattactgaataaaacacactccatcgtgtggatgaaatgctaccttaatttgtcaaagctatcattttctaaacttttctttttaattcaaatcattaataatttgtgaccagatcaatactgattcattgttttaagcttcaaatgcattatacagttgggcagaacacatttcctctcatcaatcttcttttccaggatttgtcaggtattcctgacattaattcactactaatatgcacagtttctctaatcatggtcaacaaagatctgacagtgcattgtccctaaacgatccatacttgcctcactgacaccatgtggcccacttcccatctataatctatgtctgggtgtgaagcccttcccatatgatcccccgaatggaacttcacaagttcgaattcactgggtcacagtgtgatagtgtgaagatgggaggacgttaagggaaggctatgggtgagttgggaaatgtgttaggcagggtcagagattaccacatcctaaaaacaacacttaaggagggagatgacaaaacaatcaatgaataacatgactttttccagtgaaagtgccatatctaatccttttccatttttgttctctgagcttctttcttagggaagatccttcttgagaagcccctgctgagtattaggaaaatgcatttcaggacctctcatcaacacatcctctttctttaccacaaccacatatatgggggcataactcaacatgtgtaaaagacaatcttctgcttttcactgaacctccaggaattcaggacaataaacgtctacatggagaccaacaggtgagtttttctgccccttctttcataacaccgttcttccctagtgaagtccacacacatccttacatggcagctgtgggtatatcaactggtctgaccccttttagtcacagagcctgaagtctctgctagtacctgctgagcacagggtcatgggtgagaatgggcaagtctttttctttctctggttcctgaacttcccaggctctctcacttctggatcctgaatacccaaaaaccaagcttccttcccagaaccaacacctcctcctcattagaaagatacctttgttctgtgcttactttataaagtcttgctctttccctatccactgccttgtgtcagtatgtgtgtgtcttggggc

SEQ ID NO: 45418 - DNA, 2049 bp, Homo sapien
cgcacctgagatgatttataaattcggtacctttgggacaggcgtggatgacatcccataatttacttcgttattaatttctaaatgtaatacataccactctctaaaagtattttttaatttgaaatatatttgtatatatgtacatatatatttatttatttctgaattttgtctccagtacatataatgaggcttgtaaagtggatagtgttcaggacataggtggattttgcttttaagtagtaaagacttaattggtgacttactggggctatttgataaggatttttttttttaaatgaacattaaaaacagtgaaattgtatttccggatttcattagcttcatttatatcttaattggtgaaaactgtaagttaataactcatttttatttcctttggagattcttaagtttgtgctaccaatgattatttccaaaaaaaggcacacttctggttttcccagaactaatgctagcttctcaatcttttgagtttacttgatattaatgtttgacctcaaatcatgtcacatttttgaagaaaactttctcttagccagtggaacataaaccaccctggagttcatatagaggaggggttcaaatgcctctgatagtgtcgtgttaaaactcatggccaaacccaaggtcacatagctttctttccatgttttcctctagaatttgtatagttttgtcattataaaatgggtcttgtcctagaccccaagaacaggtttttggatttcacatgggaaagaccttttggcaagtcacagagtatagtgaagttaagatagtttattagcaactactcagctacatagcagggcgtcctcagaaagcaagaggaggaatgcacctgttgtaaacatataatttttttttgaaacagtttctctcctgtcacaatggcatgatctcggctcactgcgacctctgcttcctgggttcaaggattctcctgcctcagcctcccaagtagctgggattacaggtgcgtgccaatatacccggctaattttttgtatttttggtagagactgggcttcaccatgttggtcaggctggtctggaactcctggcctcaagtgatctgcctgcctcggcttcccaaagtgctgggataacaggcatgagccacccggcgcccgggcttaatgtttgtttatataggttattaagaatcagtttgtgacaggctattagtattgttacttctctttgttactgtcgattttaacatcaatttatgtgtgtactattacctttaaagtaaaacttatttttaaactaagaatgctgagtggtgtgctgtgtgggtgtactgtgctggtgttctatgcaggtgtattatgcatgtgtgctgtgaaagtgtattgtgggggtatattatgtaggtgtgccatgcaggtgtattgtacaggtgtgctgtataggggtggtatgcaggtatattgtgcaggtgtgctgtgtaggtgtattatatgggcatgcagtacaggtgtgcagcatctgagctccgtcttcaccttaatcccgaacactcttttcacctctcacctgcactgcagtgctgtttcctggatcacacttttttgtttgtttgtttaattcctccaggagaatgagtgtataggaaataaggatttctcttcacattttacttgactaacagtttctctggttatagaatatattttggatttaaagctctctctgaattttgaaaacactgtttcattttccgcttgcctcctatgttgttctagagaagctcaatcgcaatctcgtcccccatcctcaagcgatacacttcttttttctttattatcttgaagcattcagggtcttttcttcatttttggctttctgaaattgcaggacaatatgatgtaggttcgtttttatctctgtgctagctcttttcatttggaaacctgtgttgcgttctgaatgctgtggtctgaaagtgtaccttcaaattcatatgttcacacttaatggccaaggtgatagtattgagaggtggggcctgaagga

SEQ ID NO: 45419 - DNA, 1160 bp, Homo sapien
cgtgagggcccagccacaaggtaccatctgggaagcagagtcccaacccttgccagacactgagcccactggtgctttatcttggactcccagcctccagaactgtgagagataaatttctgttttttataaagtactcagtctcctgtattttgttggagcagtacaaatggagtaaaacactaagacattttctggaattctttgattgataattttttcttctcagtcttttatcttgtctcttccttgaacacattatttctggtgttgaacattccagaccacttctccaattttcttatacttttttctcctatttttcaccttttagatctctttttgttgttgatttactttctgtgaggtttaccaactttatctagtacaagttttatggaatttaaaaattgtttcagagtttaagttcccagatcctctttttttaactgttcatttttcatgacttccagttctttagtggtgacgtatcttttctctctgaagacagtatttacagttactggaattccttcctgctctccacctgtctttggtctgttttccttttcccgttttgatctctgtccttcatggtgcatcctcctgttgactcctgaccatctgttcacatggggctgctgtggggtgaccgggccacgcagtctcccttggcagctctcagctgtctgtatccgtcagcattttctcttggtctggtcaggttttcccagaggggacagtccgttctccagcctgggacagaggtcagggacacatgtgctccctccctgggttggctctttatatggtgagtggcaactggttttggacctctctcttgcaggctgggtctgtgggatgtaattagaaagcaactttatttctattcacttacatttattcattggaggaggagtttctctttcctagggtacacgtggacatgcctatgacttttctgctttgtcttatgtttaaaaatgtccttcagtcattgcaggtcacaagcaggctatcagctcagtaattaaaataattcggttcttcatagtgaatgtaattctaaattagattttaagttgtaactccctgcttcagcaatggtgatggggcctagaaaccagagcacctgagctccatcctacagggggccatac

SEQ ID NO: 45420 - DNA, 1501 bp, Homo sapien
cgctggcactttagtgataaatttaaattaagtgacgggtagtgaggtgtttgtcaaggaaagtgccgtccaaatgctaaatactgattatttctgcagcagtgactgcaatacctcactcaatctctgtctttcttgaagaagtcataaataaacacgatgaatctatgtagaagcggtaagtcagaaaaatctgtgtgtttcattacataaacaacggtttatcattaattgacaggcttggattgggagttgttaatgaaactgatgagatgttggacagatgagctccctcttatttcgaagagcttatctagggctgagtcatgggacctgatagcgtcttgtggtgctgtcttcttgtagatatatccgtgttttagaggatttagttttttaaaatttctcttagaatgtgaattttacaaaaaagcacttcccaaatggatgattatttgaaaaatgaattgtcagacaaaactgacacatcagttatggagaaaacccttcaagaactggctttaaatgtgttttagtgggagccacagtgtggagagaaacagaagagggaggagagggcgccccttgtttcttctctccacagccaggccttcgccacctttctcagtgtcttcaagaataaaatgcctccgttgttggttttagctgcttttctccctcggggtaggtaaagtggttccaaaacgacaagcatcctgtaaagtcggaagagctgtgtcaacattaagctgcgtgactttggctatgagggaaaaaaggctggtgagtgcagagaagacagagctgtggcagggctcctcccgccaagtcgccatggagaggggctgtgaggtgtccttaaacggcctggtctccagggtgactcaggaagggctgagagtggtcagctccctcacctgctaaacccgcagcgccccgctcagcacacaccctccactctccaaccttgcccaagtgctggtccgtcacggcaccaggacagggcatggagacttgggctgattcttttctctcccttcctccctcttttttttcttctctcactcctccttttcctttcctgctgtttcctgctctcctgtttctgtcctgcagtgtctggagctccagagaggctggccctggggtggggtccacatggacatgggcgtaagcaggtttgatggtcatgggcataggcaggttcgatggccagagttctttcagctcacagtaagttttgttttgttttgttttgttttgttttgttttgttttgttttagatggagtcttgctttgtcgcccaggctgtagtgcagtggcgtgatcttggctcactgcagcctccaccttagagcaatcctcttgcctcatcctcccgggtagttgggactacatgtgcatgccacatgcctggctaatttttgtatttttagtagagacacggtttcaccatgttggccaggctggtgtccaactcctgacctcaggtgatccatc

SEQ ID NO: 45421 - DNA, 1527 bp, Homo sapien
cggcaagaattaacgaggactggacagtgacaggcaggccaaagagtgagaggaacttcactggcaagagccaacagggcttgttgatttaggagaggagacaaaggactgaggggtttgggggctggggcctgggagggtggagaagccactgtctgcattatgggatgcaggaggagaagcattcagttctccacacaatgagttccctgagaggtgtctcagtgggatcgtggtgcagttggaaatgttcatgagaaagatgagaagcggcaccagcagcaaacatccaggaacccagaaaccatcagcacaggtgcctgctgagtcccatagacccactaatggcccaccaggaccaaccaggaagcaagtgtggagctgggagtgagggagctgggtgtggagatcagggggaagactgtcatctaaagggcgagagtgggaaggatggagtcatctgtagctacagggaaccaccattagtcagtccttgtgatgaaggtgcaagatgttcctgcttccgcgcacgtcgctcctgggctgtgggcaagtttggaactgctgttgttccccagcatagtctcaagcgagtggaatgacggtttcctatagaagcacagttcctacaggaaagaaggcgtggttaagagcatgagggccaaggaaaaggaggggattagagatagccagcagtgagggagacggttccagacacgagccgagtgggcaaagcagggaattcaagagagagaggagcatatattacgcaaattttaaattttttggtagcaagcaacctagcaaaactagctgaatccaaaggggatttattggctcacatcataaaaatctagtgaaagattctagctgaagtcataactagatatacgagtttaaataattttgtcagaaactgtttctttgctgctcatccacctatccatccacccatctatccaaccctccctccctccatccacccatccacccacctacccactcacccgtgtctttatccattgatccacgtgcacatccatcctttcatctctactttcctccatccctctcccttgcctccctccccatccatctgcccatccctccatccacctcttcatctctcctttcctccctcccccatccctccaccccctgttcacccacccattcatccatccctgcatctttccgtccacttctctatcttcttgtctctgcttctctttgtattttgttctcactattctctatttcataaggcttcctgaaagcggcatccatttattccttgtagcaagatccctagagaaagactcataatttatctctcagtgttcataaactctcagggcaagttttatttggcctgacttggatcacctgccaatatctgaacggattgcacacccaggtaatggagtattttaatcactgcagaccccccaccctcacctgaccagtgccccacagcaggaccacgagcagggccaaggtgtctccaaggtgctgaggagctgagcg

SEQ ID NO: 45422 - DNA, 2570 bp, Homo sapien
cctggacacacatacctagacacaccagaatcaaaatgttcaagacaaagacaaggagaaaccttgaaaggaacagaataaaatggctcaccacaaagaagggaacccagtaggattaacacttgatctgtctgtaaaaggatggaggccagaaggcagtgggataacatattcaaagtgctcagaggaagaaactattaatccacaatcctatatccagcaaggccatctgtcagacatgaaggtgaaataaatttcaagataagcaaaaacggagagaatttcttgctagctgaactgctttatgagatattaaaggaattcttcaggctgaaaacaagtgaactcatacgattttcaaatccacacaaaaaagcaaagggcagtagtaaaggtaattatgtactttttaaaaaaggtgtaaatgcatatattttctcctgttttcaaaagcaactgcataggacaataagtatggaattgtattattggacgcataacatacagaaatgtaatatacttgacaataacagtacaaaggaggcaaatgggaaaaactgcactggagtaaggaaatggccacatattgtataatcccatttatatgaaatgtccagaataggcaaatccacagaagtagaaagtagattcatagttgcctgggcttgcgatgtgggtgcaagaaagaaggaaatgagtactaatgagcatgtttcccttagggaatgacaaaaatgtgatgatttcacagctctatgaacgtactaaaaaccattgtagtattaaaaaaaaaaaaaaagaacaaaagaaaagaagagtagaattttgggtacataattgtaaaatcaatctttagtggaaagctctgttatccagaaactcaaaattagctacataacttccccagaaatattcatccgcagcaaatattcatcagagacagaatccaaacccaggtctgtgtgaatctaaagtttattttcctccacctgccttaacaacaaattattgaataactcaaggacacaatacctcgaaagagtctgaaacatttctgtgatgaatttacttatgaatcccaatactcttgattctagatgatgtgttttgttcagcatctgtttcagtcatatcaagtaaaaccacttcccccaggtaatatagttttcctttttactttttcccttggcctcagcatttacagccccgtgcagactgttttaacaaacgcgttggtgaggtgtggtagaatcacaggcaaaggcgtgctttgctgtgctgtgtaggtacatatcaaacgctcaccaagaaattataaaatattattcatagcagtttttttcttcagtattttatgggctaagtgcaatctggcttttgataacaacggctgaataatatttgagtttgccagctgaaatgtcctaaatatcttattgattcatttattgcctcttcaaataacaaggcaacaagacagtgtcagaatgctcagtgtttttacttttttgtctatcatgggatggtgtcagtttcagtaaaaacgatgtctcttattttggtccacattgtaggaatctcaccagtgacacgcgtttgtgaaaagctgtgaatattcagtgccacagggttaaacctcggtacagaagcgagaccctgctgggcagagaaagggtgacctggaaggtgtgtgagggccccgcccatgggcccctgtgatggtcatggcctcaagaatcacagtccaggtgaggccctgaatatccacagccaggaccagttccctctgctcttgggtgccaaggccaccgtcagccaggagaggcctgcagaatcagcctgtgcacctctctgacgataagcagagatgctggtttagagacttgctactcacggggaagtccttgggcctcctgtactcacattacctggaacttcttggaaattcagaatctcaggccccaacccagacggactgaatcaaaatcttcattgtggtaagaccctcggtgacacacaggcctgggaagcacaggttagcgtgtcaccttgggcaaagctctcagcattgtgagcctctgttttctactctgtaaaggaggcatgaatatctacaacatcagtttgccatgagtattgaaaaataatgtcttagaagcacagggcagagcctggcatgtagtttgtgctcagtgcacagcagacaagaaaccacatgcaccagacctgggcggccgtcggcagcccaccctgagcaaccatgggtggccctcttgtctctcgggacaagaaatgcttctttagaaatgcttctttcctttctaaaatgaaagttttggacagtatttcctttcatttaaaaatttcatctgtgtatttgatggcctctgttgtttctttcctgaaactcctgctaacatactgggagctgaagaagggctccgtgaaggcgagtaggggtgcctgtccctcccagggaggagcttccctcctctcacctgctgcacgagccctagtgcttcaccaactccagcctcagtgccctgacactgggggagggaaaggaagcg

SEQ ID NO: 45423 - DNA, 1126 bp, Homo sapien
cgtaaatttccatacacttggttgttgacaattaagtagattgtttttaaagatacttgaaatgatatcagaatttcctaaatatatcattaaaacaggaaacttagttacctactcactcgaatcactagagaataccaaataggaataggaagataacacactggtaagaaaaatgtccaaggccaatcacaggagtcaaagctcgtgatcaaatcagctctgcctggggaggccgtgctcatggcaccatttagtgacaagtgggtgactctggggcaagttccaggggtgtcacccccaaggcagcagctcaggtgcagccaccatggaggcagtttcactgaggggccctctgaggcccctactctgagattctaagacagggtttgaagaatgttccagcatttgaacacatgaaccctatgatgtcctgctgtgagagagaacaatgtcccaattttgcccaggtgatttgaacatctcggtatggatctgttatgggttgaattttctcctgcccaaattcttatgttgaagtccttacccctgatgggactagatttgtagacagggcctttaaggaggtgattagcgtagtgaggtcaccaggtgggccctgatgcaatctggcatcctcctaagaggacatgaggacacagacacatacagagggacgatcgtgtgaggacacagaggatggcatctgcacgccaaggagagaggcctcaggaggaaccagccctgcccacaccttgatctgggacttccagcctccagggttgtgagagagaaatgtctgttgtttaagccatgcagtctatggtgctttgttatggcagctccagcaagctaacctgggatctaaaatgatacttaaactggttcagtctgattcttaaactggttcagtggagctaggccaggctccctctgagcagatgttggtccctttgcaggcctgctgtgtgtgatgattgctaaccaggttatgacagtgatctttaagtaagtgggaatcttgtgagttttgaggttttgtttttttttttaatgaaatctacatgggatgtttcaaaaatagcagcctctgtatacatttgtcaagcaggaagctgggtctgcg

SEQ ID NO: 45424 - DNA, 2112 bp, Homo sapien
cgtcccccaaaagctttgcaatgagtatctgatgggaacaaactcagtcaaggacaggcccaggttggggcttgcaggctgcagattcagaattgtttatgagatgggagccatactttctaacaacaagacctgaatttctcaatttaatccaagtcgtgacttaagttagcgcccttccgttcctctattacatttctgttcggcatggatcaaattgcctacaaggtggaacagatttcaactgcaatctctgaaccagaaaattcacttattctcatgaaagtttgtaatctttggagagttgcttaaacacttaaaaccatctttcctctttctatactccaaacttacctgctgcaatttcttgctaagaagcaaagtgctatttgcctattcctatctctctttaccatcagacactccttaagttaagagctagataattcgctcagcctcaggccaggccgagcctcactctagaagtcacattcctgaggtgtagggggtcaaaatgcctctcattgttcagaagcaggtgaggggccagccagggcacatcctgctctccaggcttggttcagataactgtcagcccagttttcaagagcacacaccaaaaatgcaccaaagcttacatccatacaaacacccgcacatggatgtttatggaagcttatttgtttttattcataatcacccaaactcagaatcaaccaagatgtccttcagtagatgaatggataaactgtggtgtgtccaggcagtggaatattattcaacgcaaaaagaaatgagctatcaaggcatgaaaaaatatgggggaactttaaatgcataaatgagtgaaagaagccagtctgaaaaggctacaccccgtgtgcttccaactacaggacatcctggaaaaagcagaattaccaacacagtgaaagataaggcctggtggtgtggggaaggatgaacaggtggagcacagggatctttaaggcagacaatctactctgtgtgatactgcaatgatgagttcatgccactatatattttcccaaacctatagaatgtacagcaccagtggtgagccctgatgtgagctgtggactctgggtgacaatagtgtgtcaatggaggttcatggactgtaacaaatgcatcactctggtgggggatgttgataatgggggaggctatgcatgtggggaggtgggtacatgggaaatctctgtactttctgctcagctttgctctgaatctaaaactgctctaaaaatcgtttatttaaaaatacaccaaagcaatgaggccgggcatgcatacagccaaagccaaatgatatttgtgtgagtcaggtaaatttgagatctgaaaaatgatcactccagggaggctgagctgtcatggggcacttattgagaacctactttatgcccatctggtgcttagaattacgaattagctattattattactaaacaattcaaaacaaagtcacttatctcagggcgctttcaatcttgttgccatcgaagctaacaaaagtggaaacagaacaaagctacatacggcacatttcccagaacatgccaggtggagcctggccctgttgattgtgtgtggctgtcacttgcaggagggttccatggacaagtgagtttgggaaatgctgggttgggcaaatatcaacaggcttccttactgcaagatttctcatagtcaaaacatactttaaatctccaagaggatgatacagagagccatgtttcccataattagttggccccagaaacagtttcttctgggaacattttgtaagattagtgctccttgaaacacactgagggagaggctaaactgagtggtagagattcatagactatttggattctggccccagagtataaaaggccagggggaaaggactgtgttcctgagatggtgaggtggagaaggggacgtgtttctccaccacccacagagagggctgagaagccctggcacacgggctgaatctgggaggtcagaaggtgaggtgagaggacaggaagacagcccacgagacttccaaaggaaatggtgagtcttaccatggctctctgggctgatggcagggcc

SEQ ID NO: 45425 - DNA, 1093 bp, Homo sapien
cgccgtgtggtaaactgatgaaccccgaccctgatcaacatgagatgactgccgtgtggtaaactgatgaaccctgacccattaggctttggctacagaatgtggaaataagttgtgttactacatgtgtgtaatcctagggtgcaggacaccggccgggaggttccatagagtgatgggttctgcaggtaactcatcctctagtcctctgtaagctcctagaaggaagaaattatgtcctttagactaataaaattcctccaaaccaaatacagcacctactgtgaagacacaaagatacttttagaatagtaaaaactttatccattgagaaattccttaatgaaacagtatccaagaagtcatttgccagcagatttcttagaggtgcgataaagaagaggacattgccagtcgtcacagcagctgcaatagctcctctctattgttaaacagtgggatatcttgtgcaggttttcagttgacaatcaattttaaagattagtttcggtccccatcaatcaattatttattaacccatcaataaaaatttaaatgctctgtgaggtacaatagctattaaaagagacagaggcactttctgtgtccagaggggcttttagtctgctctggaaagcaagatgcgtgcagatgagtgacgcagtgcatcgtgtggatgcaaagggagggactcacatgggaaccagaggagctacgaagggaggcagtggggactggtgggtcgagacctggaaataacacatgaataggcaacaaaggtttcctttcctcttccatgcacttcagtccttgaaaaacgtcttaccacggaattccacagcgtaccaagcgattccacagcttgatggcacactctcctttctcagcattcttgaaaatggcgtgtgagccaagccatcttactgagaaattaccttaaaccatttgatgaaccaaaaatattttgtaatacccatctccgacattaggtaggcaaatcacacagaaacaccgaggtcttctgagtcatatttatctgaaaaatcacagcttgggtgcatgtgaagccagaggagcactcctggggcctgcg

SEQ ID NO: 45426 - DNA, 1743 bp, Homo sapien
cgtccttcctgtgtgagagaaggcagagcctaggcagcattccaaaccccatccagatgggaggctgagtgcagagcaaacggagcccagcactccagagccgtgtcccttcactgccatgatcacatcacaaacagcgaggcttggagaggacttaagagctccttcaatgccatcttccatccactgcgtgagccagaatagaaaaaaaggaataagaagaggtcggttaagctctctattaagttgagaaaatgggaacttcaggtgatcatgtgagatattcaagttaaaaaaattatttaaaaagcacattcttattattaaaattttagaaagtacagagaaggaaattttaataacctacacctagaacactaagatactggtaacgtagaaaaatgtgtagttaatgccttgatggattcttttctatttttttctctagcaatatttatgtctatccacagaaagcgtacactcatgtatttgcatggctaatatattttatgtaaagttctatatatttctcaacatttcacttaatatttctttataaacatttttccagtgaataaaaatttttccaaacagtaattttaatgactatataacatttcattgcatttatatatcatttgttatttaactacttcatcattttggattcacatattttcaataatttccattataataataatgtcatgaatacctttgtacaagaatatttatatttctaattatttccttagtctagtatcctaaaaactaaaattcctacatcgaaaggtcaatgtgtatcacggctcttgattgacatattgatttccatgaagctttcatcaattaacccatgaacagtgtctgcaagtgctccttgccccataccttccacaatgtggactcttattggaagtatctaaatttcacttcagaattgcagccctgagttattaaacacacctctactacacctatgaaattgtctacaaattgtcttagtttcttttcagctttgatttctagaattgcatgacattgaagacaaatgatataatacccataaagaaggttttatgacctctttcattatctccaacaatcagaaaggcaaattcacagtagagggctgagaaatcttatctgaaaattaactaaaatgctgcttttgtcaacagaattacttgggcttcatttcattccacaatttcctgtgtactgtttattacaagaagaaaaaatttcctgccatacaaaatgctccatgcaggtagaaccaggaatctaaagaaacctgaggaaggtgctagaatcatcactaccatctttttttttttttttttttttttttttttttttatggagacagggtcttgctcttcacccaggctgcagtgcagtggtacaatcttggctcactacaacctccacctccaggggctcaagcgatcctcccacctcagcttcctgagtagctgggaccacaggcaaacgccactgtgcccagctaatttttaaacctttttgtagcaacaaggtctcactatgttgcccaggctggtcttggactcctgggctcaaacaatcgtcccgccttggcctcccaaaatgctggcattccaggcaggagccactgtacctggccccaccttctttttgctgtaggctgagcacaggagaagttgaatttatcagggaacctaaagacatgcccttctttgaaggcagaagtcctgtcca

SEQ ID NO: 45427 - DNA, 2317 bp, Homo sapien
cgttttaagctgacttttcttctcagccctctgtaagagtttcgaatctccccatagcaatcaatgtaattgttttcacccagggtgttggtcctggctgcttcgattttaaagtaatctctcattttgctgaggagaatttattagagtaaatgactgttttcacctgtcatgtcacattaaaatgtggagagaactggttgtaggggcagtcaaactggctgtgagacccttcgagcagccatgcatctcctggacagctcgaacactgatcagggaggagatactgaaaataagaaataagaattgcctttatatgtgtgtatgagtatagacacatacatcatgtacatgtatgtgtgtatgtgcatatgtgtgcatgtgaagatggatagatgatagatacataggtgatttatgtataggtagatgacagatattggtaattaattgatagtagataggttgatagtatataggtgattgatagatggatgatagatcattgatagatgataggtagatagtagatagattataggtagataaatagatggatgatggatggatgatagatacttgattgatagatgataggtagatagtagatagatgatagataatgatagatgatagctagatagtagatagatgtgataggtagatggtagatagagatgatgatagatggatgatagatggatggatggatgataggtgattgatagatggtagataggtggatggtagagatggtagataaatagatggatgatggatggatgatagagagctgatagtagataaggtagatagtagatagatgatagatggatggatgatagatgattgatagagagatagagagagaaggatgatagactgagcatcataacttcactgaatgctaccagttggattcaaaagtcagcaaactgaaacgtcgaatttcagccagctatcagaaatattgtaatctgacaacaaaagataaacaagggaacatggaagtggcagctattccagaagctgcacctctcagcatgggcacagaaccacagaagtggagccagagtcctctccacatctcctctgggtcggcgttatcattgtcacaatgggtggaggctggaccttgtgaaggcaaaggcatacggtgctttcttgcttctgctgtttggtgactcccttactcattccctctgcggtggctgaggggctgatgatcagttcctctgcccagaatgccctgaccatgctgggtgtctgtcctccctagacctgggtctgcaggatgacaaggaccctgcagcagaaactcctctgtctcttccctgagcaccgtcttccatgctgcctgactatggtgctggttcccctctgatatggagattggtggagaatgaccaggatattttatgtggcaatgggggttgaagcccacttcaaaatggcttaggataagtgaccaaaagtcccagtgtgagcatcaggcatggctggatccaggtgctcagcaccatctggaaatttgtctccatctttgactctgctgtctctgtgtgggcttcatttctaagatggttttctctgcacagctgtaacaaagctcagggcttgcatgatgctttgcagccagtacatcagagaggactttccctcaagacttctggcaaaatttggggtaacatgctgttcttgctggggtcaggagccatcttgcaccaatctcagaggccaggggatggagaactctcctagggtagtcccaggttctgtgcctccccggaaaacacaaggtcggagcctccccatccaaattaatgctcagactgtcagggaggaatgacttccaaagaaaaaccaagggcccttatgaagaaaaggaaggggtgcacctacagttgccagttctgtttggaagtgagggaggggagggcagattcccttggcttgttccctaggacagctgtacttaggttttactacacagtccactgaaaatgcttctctcattagtgttgtgcctctctcatgcctctttccttggataaagagcaagcacattacgagccacacttggtgctggtgctgtggcatgcaacactacctaatgcgagagaaagatgtgagcaaatatccggaatatacaaatataatacaaaaatacaaatataatcagttatacagcaaacagctgtgggaacagcagctctgcttgcagggttgggtagtggaaggtttcagagttgatagcatttggattgggctttaaggtatgactaggagcttaccagatagagaagtggtgtttgga

SEQ ID NO: 45428 - DNA, 1793 bp, Homo sapien
actcagagtgtttaattgctcacctacttctttttctgccctcttgggcttctgaaatgaaaagaaccctggggtgatacagtgagtcaaaggggtgccagctgcatcacagcaaaatagattcctaaaaaatccctggcctaagatgatacccttggctggataagtttgaatgtgctcatagtggacatggtagaatgaaggtggttgaaatgttcacattaaagaacttccacccagattgcaagaaaagagagaagaatggagacggcagcacgagtccctacaataaaagcagatgttttgagatcagttatatttcttctgacaaaaattaaagacagaaaccaaagtttagcctgaggctacaattaattgggcaataagccagaggcacatatggcatagacagatttaaacatttctccctgatattaatacaaatactaaaattacaaatactttgattccaaataaaacaaatatttaaaaaatttaatgaataaacactggggtctacagtagtatttgaaggacagctcacaaacaggtttggtttttgaaggttagaactggtggtctagagaattcatttcattccagagagagaaagagaggaatttcttgggttccttcaggaatgcgtctagctttgcctcatctttgtttgaactatggatacggcagaagaaaacatgaggatttcacagatttaaggtgcaaaaagtcactgggttctctaagaagtctgggattcttctgctggaaaaataagtttgttgagaaaaaatgagttggaggaggctgttattgaagtgaagcagaattgtttttactaatctgcttattacccactctgtagtatggaaacaaattattcatgcacaaggtcctcttgctgttcctagaatgcagtggaaagagaacagattagttttcctccctcagaacacaatccctagagacaacctacctcagatgagatattgcctaattattttcaaaagacagtgaaacatcatggatgtaaatgtttgctgcaaaataaatacatgctagaaacagaagcatctgggtcacagctatattagagctgcctgtgttcccctgtcactgagattaaaacaaaaatgtccaatacaatcattcacagcatgggagaggggaagatgaaggatggaaaggccaggcataaaaggatttcagaatttcggtccataaggaagtggctttgtgcattgtctgttactatgtgcaaggtgaagtttgaagaatgaaaacgtgcagtaacaaaggctgctttgtccatctcacctccccagataccaagtttcagacatgttgcattttaattgaaaggttgatataattttttaaaagaacacttgtggtgtttgaagtgacaaaggctgctgtgacaaaaaagcagggaaagggaatttaaaaaaaaaaaagcaaacaacaacaacaaaaaccccacagaaaagcaaacaacaaacaaacaaaaaacagaggaagaagtcaaacaccctgggctgtggctacttccaggaaggggctacaagaggcagttggaaattctatttgttttgcaactgtgggttttccggcctgcttcctttctaaagtatattactctgcttttggttcatgaagttatccatttctgttttctggaacagctatgtatttatctatcatctatctatctacctgcctatcatctatctatctatttactatctatcttttctacctttcgccatcaagagcttcaacacctggacacattc

SEQ ID NO: 45429 - DNA, 2909 bp, Homo sapien
ctttgagttcggctgagttttgggttggagaattttcttccacaggggattgtcttggatttttctatttctccctcagtatccacctggaaaacatttcaattaatttatattcacttaaacatttccgtgcaaaaactgtgtacaaaagccccaaagtataatttgcgcagttgagcacatgttctgttgtccagcatttatggtggtttgtagtggaaaagatttttagaatatgtggatttttgggatattcccagaagcccagatggccacactttaactttggaggaattaattctcagaatattgcacacaatcaatcgcctttggaaggagcatatattcccagcaaaagctctggttttttgaagtctgtgttgtgtgttatttccaggagaatatgcaatgatgacaatgttattaactgattcgaatatgaaatgctgttatgccaaacaatgaatctttgtgttacacattatgcctaactataaatcttcgtgttatacattttaatgtcattggagagtactcctgtcttcttggcattattgataattcgattctaattgctaataagtcagaaaaattaggaacaccaaatttcagtcgtctcaaaagcactcctcttattaaatttggatttttacctttatcacatcaaaagaaatattgttagaaaggtgtttaatgttttccagatggttagattactgttattagttctgatttcattgttaatttttaaaaccatagagttggaagtatcaatatgcctttcaatataccttagtggaatttattaaattttcatggatgtcctttaggaggttcaggaagttatttctattgctagatttctggaagatttatcaggaatgagtgtcagacattgtcagacgtccattgaaatcatcatggtcttttcctttattctattaatatggtgtattacactgatttttagatttgtattggtaggataattccacttggttatattgtctaacttttttctaattttctttaatttttattagagatgaggcctcactctgtcacccaggttggggtggagtggcacagtcacagctcactataacctcaaactcctgggctcaagtgatcctgccacctcagcctcctaagtagctggcactacaggtgtgcaccaccatgccaggcttatctaacatttttatgtgttgcttcttccagtttactagagtttttggagatttctgtcttcattcatgagggataatagtctgcacatttattttcttgtgatgcttttgtctgatttgttatctgggtaatactggcctcaaaaatgaattgaggttttcctgcttctctgctttgcaagtgtttgtgaaggattggttattcattaagtgtttaatagaattcactagtgaagctttgtgagcctgggctagactgatgaagagttttcattagtctaatctgtttacttgctgtatgagtatgcatatattctctttcttcttggtttacttttacaatttctgtatagcagggaatttgtttctaatttgtagtatttcatgcttctaggttttcatggcagttgagatgtaagaataaaaataatgttgggagaaagaagttgtggacaatctgtgaatatcccaacatctgttgtaggaaggttaagattttttttttttttttgctgtacttaactgaatactcatatttatagtgtgagacaaatgtaatgttgtgtataaatagaactaggaaaatgtcttagtatttaatcgagatggaagtctgggcctacctcctctcttttattaatatgtagacaggacaccaacacaaatttgaatgaggacaaataaaatgttagcaaatgaagaatagtatgaattggttaaaatgtgatgaaatagagtggtgaatatttacatagaatccatgatgtgttaggtgctatttcaagctatttgcacatatagttttaataccagtgacattaagatgtataacacaaagattcatataaataaaaattacaacattgaaaataatattagatgacactaaaactatcgtagaaatacacatttatataaaacaaagtaacatcaagtattaaataaattttagacactttgattactaatcagatgaataagtgattagccttttaatccagtaaacaaggcatacatattattttcaaattccagagacaaatattttaaatattgaagtctaagacctaaaaatgtgtcctgtaactctgggggagggggtttcatttgttccacctgcagtgaggtctgttagcccgtctcaggtttgactcctgacttaattcctaacaggggaagctgctgtcctgtaactctgggggagggggtttcatttgctccacctgcagcgaggttagcccgtctcaggtttgactcctgacttaattcctaacaggggaagctgctgtcctgtgactctggagaagggggtttcatttgctccacctgcagtgaggtctgttagcccatctcaggtttgactcctgacttaattcctaacaggggaagctgctgtcctgtaactctgggggagggggtttcatttgctccacctgcagcgaggttagcccatctcaggtttgactcctgacttaattcctaacaggggaagctgctgtcctgtgactctggagaagggggtttcatttgctccacctgcagcgaggtctgttagcccatctcaggtttgactcctgacttaattcctaacaggggaagctgctgtcctgtaactctgggggagggggtttcatttgctccacctgcagcgaggttagcccgtctcaggtttgactcctgacttaatttctaacaggggaagctgctgtcctgtaactc

SEQ ID NO: 45430 - DNA, 1896 bp, Homo sapien
cgctgcagttcccacttgagtctgaggggggatcaggcttagtgcccatgtatttcccaattacctggttccatctgggggcttcatggacaggagtggtgcttttccaggcctcttttccatatgccagctacaggcccaggtttccaagtttctggagcccctcttccagcctggcaagcatggcgtgttgtaggggaaggacatgaagcctacaggcagcagaacctgtctgggtatgttctctacccctggaggcccctggttgtttacctcttgggtgagagtcggcttaggatctcaacattcttgtaggacttcagaactgtgccgacaggggcccaggaaggagcagaggctggggctggcagctaaccagtgtagtgggagttgtagggctcagtttggtcttgcagggaattcagggaggcttggatttgctgaagctctagatgagcttgggcttggatatggaaacggcatggagccagggcccttctgcacactggggtctgagtagttgcactctggtgcatccataggtgttccccacctggagcacagctgtggatagaagccgggagagctgtggagggaagaggaggaggagggagtctcggggcagccccagctgccaggcagggcctctgcaagtgagatgcagatccagcctgttggccacttagcacttgcttggccgcctgcagatcacctgacctctgctcacctgtaaatgggggttgcagcagcacttaccttctgggactcctgcagcttgaaggggcagcacacaccacatgctgagaaggcgcctaactcaggcaagcttctccaacagcaccacatcagattaacatccaacctgtacaggacatcaaatctccccatccctcattccaatggaagaaaagggagtctctgtcctaggggagcaagcacaggcctatctatgcagttggcagttggcacttgacccaggttggggaaaggcccttggatacatgctggtttcaccaaccatctgtgggttgggtttggcctggacccatgtaccccaggaggccagcagccccctgcatgggacaggactgggaggtgtgtgggagggctgagctttgagggaagccattatttggcctcatgggaagtggtgcaggtggttgttggtggctcagttttgcagggcctgggtgatcacccaaggagtgaaaattgcctttttatgagaaattgccaaaactgatgcaagctcatccgttgaaaaggtgagtaatgctggcagttggcttcacctgccccttccccacaagtaactggtgttcagaggtggatttggttccttcccagcctttcccgtttgcatgtagctgtgtgcatgtacttttgtgtgtacacacacattccctggaggggttacttttatttttttatttggggggataactagtgaggcagcctgacactttcttatcttgtcttttaagtgtggagtcctctatggagtgggcatcaggtacttcctagctggcctctgccagctgtttggctgccccagtttctgcccttcacagacatgccagccacctgctgtgacattcagtggccttgtttgcagctagtgtgatgagacaagtggatcaggtacattataaactgaaaaagcacacgacatgcagagggaaagggtaaatgaccatgtgtgtcctgctcggctgaagtccacatcacatgactgagatgacattttttcacctaacatttgggccctgagaaacggcatctatgttttactttttatttatgacagagttagaagaaatactaccaggctttcttttccattttccccaactccctctttaccccctcaagtttacctacctcagagagaaagcg

SEQ ID NO: 45431 - DNA, 1969 bp, Homo sapien
cgctttcttggtttgatacatgcctgggagcatgtgggagcagttaaggtctaggctcatgggaggacagttctgcccaccccagctcatctctccagctcagcctgcatacctgccttcctccatctgattccagagtaggggatgggaggtctcacactgacctcaagtttatgtgactttttccacctctgctttcccagacagcccctgctgtgggacttgtaaggagatttgtgaagtcagtatctacttttcttgtgtgggtgtttgtttataaattattcccctggaggggaataaatgttagaggtactccaaacccctaacatataaacatctaagcctggcccttttttggtggtaaaatatatataacataaaacttaccattttaaccatgtttaaaggtacagttccatggcatccaatatattcagtgttgtccaaccatcgaatttatccatatctacaacttctttatcatcctaaaatgaaacaccaaaaccatgaagaagtcactgaatagaagactgatgtatttgactccataaaaattaaaactttgtatgagagaaaaatgcctcaaagtcaaaagtcaacaggctggggaaatagatctgcaatatacatgacacacaaaaagctaatttgggatatatatatacacacacacatatatatacatatggatatatgtaaatatccatttttaacaccatttaaaaaataccatcctttccccattgaatagtgttgactcccttgttaaaaatcatgaccgtgtttttcggttctttatttctatcgcattggtctttatgtctgtctctatgctggtacaacattgcttcgggtactgaagcattacagtaagtatgaaaccaggaggtgtttgtcctctaactttgttagtttttaagattgatttggctacttaggatttttttagatttcatctgaattttagaataggtttttctatttttgaatatattggaatttttatagtgattttattgaatctgtagatcgctatagataacaatggcatcttgacaaggttttgtcttccagtccataaacacatgatgtcttttcatttatttgtgtcatctttaatacttttctgccatgtttatagtttttgctgtacaggttaagtgggtttctaagtattttattcttttgatgctatcatacatgatactgttgtcttgatttcttcttcagatagtttattgttattgtagaaatacaactgatttctgtgtattgattttgtatcctgcaactttgctgaattttatttattgtatctgacagtttatttcacagaaactaaaagatttttaatatataaggttatgtcatctgcaaacagataattttactttttaaaaaattggaatatcctttattcttttactcaccttattgttttaactaactagaaccttcagtactacattaaatagaagtagtaaaagcaggcatccttgttttcgctctgagggtaaaagctttcagtctttcaccatgttagctgtgttttttgttgttgttgttttttggggttttttttgtataacattatgttaaggtgttttctttctttttataatttattaagtacattttatcatgaatgtgggttaaattttgacaaatgctttttctttaagatgatcacatgaggttttttccttcattatgttaatgtgatattacactgattttcatgtgttagaacatacttttatttcaggagtcagttatactcattcatagtgtataatccttttaatgtactgctaaatttgaattgctggtattttgttgaggatttttgcatcaacatttgtaagggatgtttgtttgtagttttcttatggtgcctttgtctggcttggtgtcagggtaatactggcctcatataataagttagaaaatgttacctccttttcaa

SEQ ID NO: 45432 - DNA, 2285 bp, Homo sapien
cgttgggtagaattcaacagtgtagccatctggtccaggcttttctttgttgctgggttttttattactgatgcaatcttcctgctgaatctccttgctcaataggtttattcaacttttctgattcagtcttagtaggttttttgtttctaggaatttgttcattttatttaggttattcaatttttttagtgtataattccttatggtactcttctacatcctttttttactccaaaagtttgttagttatgtacccattttatttttgagtttggtaatttgagtattccctttttttcttagtcaatctagataaaattttgtcagtttttatctttttcagagaacaaactgggttttgttggtttttgatatctttttctattctctatttcacttatttccactgctatctttatcatttttaaaattttgctagcttttagttgtccctctttaatagtccctctttttccctctgtttttctttccttaggagtaaagttgttgattcggtatcttattttttataatcatttatagctataaatttttcccgtgtggtactgtttttgatgtatctcttaacttttggtatttcatatttttaatttgtctctagatattttctattttctcttgtgatttcttcttttatccattcttgggtgtttaataactatatttttagacataaaatgtgtaacctacaaaattttcttgatttgttacagttttatttgttgtaagtttttatttcagaattaaatatgtgtatcaacatttgttgtgttctcataaactttgtaatacatggagatttctggtccacatatgtaagtctctacattaatattattttgaagcatttaaacttctgttttaatatttcaaaggtctaaatgaaattgagatttttggtttctgagatgaaatcatggtaggtgactgagaaatgcttaaaaattagccaaaacttaaaattaagttaaagtttactaagtcaccctgtattgctggtaataaaaaataagtctttaatggtataaaagcaaacttcagagaatgttttcttttccccagttgacatctaaattaaaagctggaaaaaaattttatggctttatgcgtttttcactttacaatttcaactttttctggttaaaatttttccaaacagattcctgtgtatttgaaagacaaattttttttagttgaaatgcttaagcagttaaataaggccatgaaactttcttgaacctgtgggaatccatgagaaaatctgacattatgttctattctcttggaaggtagaaatatcgtttgacttctgttttgctgacaagaaatatggtcctgagcaaggctccctgggacaatgacctcacacatggaaaacgctggagcccatctgtctccaatctgctgttttccaaaaattagggaacttcagttttccctttgatactctgtatttctaccaaccacaacgccagggctgtcctgcttctacaagtgacaatgacaaatataggcctgaaggaagatgagctgatggcattcccagcttactaccactccttgggtgccttatctcacatacgtggattcaactcatagactcaggtgggtgaggatctattgttcagctacattagaagtgactgcttaagactctggtgtgtggtgaaatgaggcagaattttctcaatgcagtgttaggagaattttctcctcataattaccatcttactatcactaaatcatagctaaaataaggaaattattcaagaagaaatagagatgtaatcttatgaagacataaatttagagatttgtggagagcccttcataatttcatggtgttctctttgagctgggattatagttgacatttcattataatatattagctattctagactttatgcatttatgtaaagttttctttgttgcactttaagttctgtgatacatgggcagagcatgcaggtttgttacgtaagtatacacgtgtcatggtggtttgctgcacccatcaacccatcatctacattaagtatttctcctaacactatttctcccccagcctctcaccccatgacaggccccagtgtgtgatgttcctctccctgtgtccatgtgttctcattgttcaactcccacttatgagtgagaacatgcagtgtttggttttcttttctttttttctttctctcttttctttttttttttttgagacaaactttcactcttgttgtccaggttggagtgcaatggcg

SEQ ID NO: 45433 - DNA, 2987 bp, Homo sapien
cgggttcaagcgattctcctgcctcagcctcccaagtagctaggattacaggcatgtgccaacatgcctggctaattgtttgtatttttagtagagacggggtttctccatgttggtcaggctggtctcaactccccacctcagcctcccgaagatctgagactacaggtgtgagccaatgctcctggcctggttttcttttcttgtgttagtttgctgagaatgatggtttccagcttcatctacgtccctggaaaggacataaatgcgtagtattccatggtgtatatgtgccaccttttctttatccagtttatcattaatgggcatttgggttggttccaggtctttgctattgtgaacagtgctgaaataaacatacagtgcatgtgtctttatagtataataatttataatgctttgggtatataccccgtaatgggattgctaggtcaaattgtatttctggttctagatccttgaggaattgtcacactgtcttccataatgactgaactaatttacactcctaccaacagtatgaaagcattcctatttctccacagcctcatcagcatctgttgtttcctgacttttaataatagccattctaactggcttgagatggtatctcattgtggttttgatttgcatttatctaatgaccagtgacgatgagctttttttcatgtttgttggccacataaatgtcttcttttgagaagtgtctgtttgtttcctttgcccactttttgatggggttgttttttcttgtaaatttgtttaagttatttgtagattctggatattagccctttgtcagacagatagattgcaaaaattttctcccaatctataggttgtctgttcactctgatgatagtttattttgctgtgcagaagctctttagtttaattagatcccattcgtcaattttggcttcttttgttgccattgcttttggtgttttagtcataaagtctttgcccatgcctatgtcctgaatggtattgcctaggttttcttctagggtttttatggttttaggtcttatgtttaagtctttattccatcttcagttatttttttgtataaggtgtaaggaagatgtccagtttcaatttctgcatatggctagccagttttcccaacatgatttattaaataaggaatcctttccccgttgcttgtgtttgtcaggtttgtcaaagatcagatggttgtatgtgtatgctcttatttcagagttctatattctggttcattggtctatgtgtctgtttttgtaccagtaccatgctgttttggttactgtagccttatagtatattttgaagttgggtagtgtgatgcctccagctttgttatttttgcttagaattgtcttggctatttgggctcttttttggttcatgagaatttttaaatagtttcttctaattctgtgaagaatgtcattggtagtttaatgggaataccattaaattcttttataaattactttggggagtatggctattttcacgaattaattcttccgtatccatgagcatggaatgcttctccatttgtttgtgtcctgtctgatttctctgagcagtggtttgtagtcctccttgaagaggttcttcacttctcttgttagctgtattctgatgtattttattctctttgtagcaattgtgaatgaatttcattcatgatttggctctctacttgcctgttgttgatgtatagaaatactagcaatttttgcacattggttttgtatactgagattctgttgatgtggtttatcagcttaagaagcttttgggctgagatgatggggttttctagatacaggatcatgtcgtctgcaaacaaagataatttgacttcctctcttcctatttaaatacctttatttctttctcctgcctgattgccctggccagaaattccagcactatattgaataggagtggtaagagaggccatccttgtcttgtgccagttttcaaggggaatgcttccagcttttgctcattcagtatgatattggctgtgggtttgtcatttatggctcttattattttgaggtgtgatccttcaatagctattttattgagggtttttaacatgaagggatgttgaatttcattgaaggccttttctgcatctattgagatagtcgtgttgttttatgtttagttctgtttatgtgatgaattacatttatagatttgcctgtgttgaaccaaccttgtatcccagggatgaagccatcttgatcgtggtgggccaagctatccttaacagtcttaagttcagtctttttacataatcccacatttcttgaaggttttgttgttcattcttttttgttcttttttctctattcttttcttcctgtcttgtatcagatagttttcaagctctgagattctttcctccacttggcctattctgctagtgatacttatggttgcattgtgaagttctcatgttgtgtttctcacctccatcaggtcagttatgttcctctctaaactgaatattctgcttatcagctactgtgttcttttatgatttttagcttcttgcattaagttagaacgtgcccctttagctcagtgaagtttgatattacccacctcctaaagcctacttttgtcaattcagccatctcagccttgggtcagttctgtgcccttgctggggaggtggtgttgtcatttagaggagaagaggcattctgcctttttgagttttcagcgtttttgtgttgatgctttctcatctttgtgggcttatctacctttgatctttgacgttgctgacctttgaatggggtttttgtggggtcttttttgttgatattgttgttgttgctttctgtttgttcttaacagtcagaccactctttcctagggctgctgtggttttctgggggtccactctggaccctagtcacctcagtctctcctgcacctggaggtatcac

SEQ ID NO: 45434 - DNA, 2024 bp, Homo sapien
cgcctcccttggctgcgagtgggggctccctagctccgtgccacacctggatgggccatcaccccacttgcttttcctcactccctgtgggcctagtgggcctagtcagtcccaatgcaagaacctggatacctcaactcaaggtgcagaagtcacttgtagttttcattgctctccatgagagccatgggccacagctgcttctaatcggccagcttggccccatctaaagtatgatttcttaatacatgagatgttttaagtacatgacaataatgatatttatcacaaataatattttatctcaatttcatataaaaattgctaacaaatcaattatttttggttaccacaaagctatctggaaatgtaacatctgccatttataaaatttctgtagagttaatagaacttttcctgaagggaggccggcaatatgcatcatgaattcaagcactaccagtgaagttgtggagtttgaagtggtactcacatcttgttactgggattataaattcgtacaaactttatctaatgtgattaaacaatatataccaaaattatcagtggaaatactctctgattcagcaatttcatttccagaaatttaccctacagacatactcatgatgcctggaattatgtatgaatgggagaaagtattataccacctttttcattaacaaaagtctggaaatcaccttaatgtttatcagtcacattaatggttatcaccttactgtgtattgaaattatggttattcatacgatagcatactatgcagctatttaaaaaaataaattttaaaaggatgctcaaaaatgatgtccaatatatgttacaaagtaaaaacaaccctgggtgcagagccatgtgtctgatatgcctccattcctataaaatcagagtgtgtagaaatgcatagaatatctctattaactggtaactgttacaaaattcaaagttaatgcaggcaagacctttcttttttaatgctaacactccaaggaactgcacaacatttgaggattcccaacacatgccaatctacctttgaacctatagattttaggaaatgaggctcttgaaaaatcaagcattaatattcctagctacagttgtttgggacataattagaatgatccattctttgaaagtttgtaaaatttgctcatacaaccatctgggcctagtccttcctttgtgaaagattttattttactagagattttattttcttcacattatagtacttcttaggttttctatttcttcttgattcttgagtcaattttggtaccactttgtaccccacagggtgcttgggctcagaacacatcagtcaaagaaagagagaagaaaggaaggcaggaaggcagggtgaaaggaaggaaggaaggaagaaggaaggagacaaggaaagagagagaaggaaggatggagggagagaaagatggaaagagagaaagaaggaaatgagagagagagaaggagagaaggaaggaaggagggagagaaagggaaagaaggaaagaaacaaggaagcagggagggagagaaagaggaagggagaggaaggaaggagggagagaaagagggaaagggaaagaaggaaggaaagaaacaaggaagcagggagggagagaaagaggaagggagaggaaggagggagggagggaaaggagacagggagggagagagggagggagggaggaaaagaaagagagaaaggtgaaaggtggggacgggaagggaagaggagccagccaaaggctacaggctgtttgttcactcttctacttgacccaagcagttctgccttttaaatattccaccttctgccatgagttacactgttcaatattcatttctcagagcattcaaaggtctatgtgtgccctgccatgatggaccatggcttcagctctcaaacacaaccctcagccaaaatattcatgactgttccctcccatatactcatcaatcccccatgctatggtctgcatgtgtcccccagagctca

SEQ ID NO: 45435 - DNA, 1812 bp, Homo sapien
cgggctggagtgcagtggtgcaatctcagctcactgcaacctccacctcctgggttcaagtgattctcctgcctcagcctcctgagtagctggggctacagatgtcagccaccaggcccagctaattttttgtatttttagtagagatggggtttcaccatgttagtcaggatggtctcgatctcctgacctcatgatctgcctgcctcagcctcccaaagtgttgggattacaggcgtgagccactgcacccggccttgacttctcaattgatttcacatccatcacgggtcaacaagggggttctggtggtcgtagtcaatgagccgagaccatgccactgcactccagcctgagtgacagagtgagacttcatctcaaaaaaaaaaagtctcaggctatgtctgaactaggagggtagaaagaatagtcattttggttgccacaaaccatcgaaacaaagatgcagatcattgatgtaaaattacagttagttccttcccactccttttcagcttctcttcgttgctatgacccagcgtctcctgtgtcagttttcagtctattgtctcccagcttctagtgcacctttcaatatgtgcactgtgataaactgggaagcacttttcaatataccttctggaagtgaacattctgcaggcatctagatagaggatggagagactgcagggggcaggagctctctggctgggccttgttcaagccccaaccacagagacctaggcatggtccctcagccaccttgcagccttggctagcaacatctcgacacggaaaccaaaacgcagcagagcccatgtgatctgaaggttcctgaaaagttgcccagacctcctcttgtacccacatacaaagagtgtgtccagggtcatgagtgagcatgatattacagaggaatgtaaacaggaaaaccatagcatagagcagtggggatccatagctcacagtgatagcatggaagtttcctggttacatgaagtaattaagacgtatttaaaagccaagagtacaaaattagacctgatgaaaaagcaggagttatcatcccagccatgcagaaaagccaagccttctctcccttctcaagaaggaacagaagacaatgatgtgatctgtgagtcatgtgtaacatgaaagtacaggaaaagttgaatttctgatacacaaatctgaaaagtttttatagtaacagatttcaggattaaaagtcaatatttattacttcattaagagcaaataaatactttaagaaaaccttgttgttttaaccaaaatttttagttttgtatcactatgtttttaatattatacctaatttaaataaactttataaacaatctatctgatctcaatcagttttgacctcgaggtaagatttacgtaaacttttaataaccttgtataattttttccatcttttccaactttttatacacattttatctatcttttttattccttcaatttaaaataatccttaaaaatctctaagcgaatttactttctctgaaacaaaaaccggtatacattttgcatacagaattgtttctcttgtacctagtagtcttaatcacatatatctaccacaatattaatacttagtaacctttattttaataaaaaacctaggaagcaagaaatcttgaattgtcatatagcagtatcttacagatgagaataatttcataatttagaaatatgtgttcctaaaacatttttttttaagatggagtttcgctcttgttgcccaggctggagtgcaatggaacaatctcggctcactgcaacttc

SEQ ID NO: 45436 - DNA, 1908 bp, Homo sapien
cgccaccatacctggctaattttttgtattttttagtagagatggggtttctccatgttggtcaggctggtcttgagctcctgaccttgggtgatccacctgcctcagcctcccaaagtgctgggattacaggcatgaggcaccacgcctgggctaaaacataagtttttaaattggaaataacccagatagttaatgagtatctattatttaatttaacataactaaaatttcaaaaataggctgggcatggtggctcacacctgtaatcccaacactttaggaggccaaggcaggagtatcatgagaccagcctgagcaaaatagtgagatgctaactctacaaaaaaaataaaaattagctgagcatggtggtgcatgcctgtaattacagctacttgggaggctgaggtgggaggatcccttgagggcaggaggtcaaggttgcagtgagctgtgatcataccactgtacttcagcctgggtgacagacagagacactatctcaaaaaaatttcaaaaatacattaagatgtcttggatagacatgtatccatttacatttacttatttttaacagtttatctagagtatttgtgagaactgaggtattagacaaagctagtcatcatttctaggttattttcttgttaaccatgttatagcctgtgaatatcaggtgttcacgtaagtgaggacttcaaagttaaatacatgggtattttaccaataactcagaaaattccattacttttgttcaacaaaccgtattaaattggtcttatgtattaaaaaaaatcacaaaaacaaatattcctttttttcctgtgtttatagctttataaccttcatgccaaaccctagcaccttaaaatatctagcaaatgtaaatataaaacacagtcaaaaatgtatgctgacaattctgaagacatttctattttccttttatccatactttttaaattatttgtatttataaaagaactcttttgtctgggcacagtggttcatgcctatatcccagcactttgagaggctgaggcaagaggatcacttgagctcaggagtttgagaccagcctgggcaacatagcgagaccgaatctctactaagaataagataaaaaattgccaggcatggtggtgcatgcctattgtcccagctactggagaggatgaggcaggaggatcacctgagcctgggaggttgaggtaacagtgagctctggtcccactactgcactccagcctggggaacagagtgagaccttagagagagaccttgtctcaaaaagagaaaaaaataaagaattatttcattcttttgtttttcttcagccaagtaaccttgaattggtaataccacagacagtaagtttcatctcaacaccagtagacaagtcagcagattcaaaataggcagggaaaaaaaaatagacaggcaaaagaactgagattttttcattttagggtttttaaaaatataaactatttgagttctgaattttctttcatgttattcggccatcaggtttaaagtgtgcactagaagccaggcgtggtggctcctgcctgtaatcccaacactttgggaggctgaggcaggtggatcacttgaggccaggagttcgagaccagcctggccaacatgacaaaaacccgtctctactgaaaatacaaaaattaactgggtgtggtggtgtgcacctgtagtcccagctactcgggaggctgaggcaggagaattgctcaaacctgggaggtggaggttgcagtgagccaagattgtaccactgtactccagcctgggaaacagagcaagactctgtgtcaaaaagaaaaaaaaaaaaaaaaaaaatatatatatatatatatatatatatatatatatatataggcctgtgcg

SEQ ID NO: 45437 - DNA, 1136 bp, Homo sapien
cgggcatggtggcacacacctgtaatcgcagctactcaggaggctgagacaggagaatcactagaacctgggaagtggaggttgcagtcagccaagatcacaccactgcactccagcctgggcaacagagcaagactctgtctcaaaaaaatgtgtgtgtgtgtgactagaatggtctataatatatagccagctcgagtcccagaaaacctagcaagcttaaggttagagcttctcattttggccttttcaagattaaatctcctttagtaggcccctcccctctagggaagtacttgccggagcgctgcctaaagttggttttctgatgccctgttgtttctgttctgaatggtttatttctcattataagggctcagcaaagcaggcagagttaaaaagcagagacaggaagaatttttaaaatcgtggacttcactcctacactgaatctcaggtccccagaaagacagaaacaccatgggaccacagcaaaggcaggaggaggagtgagggagggaggtggacagaacaacaaacaggagttggctctcagtttttcacgtgtgccattttctttaggtttttctagtttatggagtctctttgttcaagttgagcacacagataaactagagatctcacaaggcttttgctgagaccatcaaagcctttaacctctgttgggccaaatattttagaccaaaaatacagatagacacacaaaagccagaaccagaccagattgagtatctcagtggctgcagcctttattccctttattctttaggatttgaactcaaaccagattcagggttctaacccaaccaggatccccctggggtgaaactgaaacccacagtctagacaaggttgggggtctttttttatttttattttttcattttttttgagacggagtttcactcttgttgcccaggctggagtgcaatggtgcaatatcgcctcactgcaacctccgcctctcgggtttaagcactcatcctgcctcagcctcccaagtagctgggattacaggcatgtgccaccacgcccatttaattttgtatttttagtagagacagggtttctccatgttggtcaagctggtctcgaactcccaacctcaggtgatc

SEQ ID NO: 45438 - DNA, 1379 bp, Homo sapien
cccagccagaagctctgtaatttcaatgatgattgtgcttttaatctctttctcggcatctggctcatgataaagtttcaggtgtcttgatggtatctaaatcagttgttgattcggtcctggagaaacacaagcataacctctacgccaagttattattttacctatttcccaactttttgttattggatctgtccaccaaaccagttgttctgcttgtgtctttgcagctggtttctgtagatgctgttcagctgctggtaacatctggcctttgggaaggctcgaaaaatggaaagttaataatgcaagattcaattgtgtctgggctgtcccgtaatccctgtttccccccttttttgtttttattatcagttgttcatctgtatgaaatcgtaactgagcattttcaattaactgtgtggaatgaaccatgtatgaagaatcagaaatcacattaataggcatatcaaaagcagtcaatacctcaattacagctacaagctccactttttgagctgaaatatagggcgtctggaaaactttaccttttgatccagaataagaagctttaccattactggacccatctgtgaaacaatgaaaacgcttagcaggctgcaggttgtttactgcaggaattgtaaatgcaaatcgttcacagtcttgctcagctaaaagggtagtaaagaaacagtcttttaaatctgtgactattaaaggccaattttttggaattatagtaggagaaggcaatcctggctgttatatttccataggttgtataactgaattgatggctcttaagtcagttaacattctccatttacctgattttttcttaattatgaaaactggagaattccaaggggaaaatgttggagctatgtgcccattttctaattgttcagtaactaatttctctaaagcgtccagtttctctttgcttagcagccattattctatccatattggcttatctgttaaccatttgtaaaggtataggttctggaagcttaacaacggccgccgtcaaaaatgatatcctaatctttggcaggaactttgtctttccacttgaagcagttctttcaaaccttgcaaatattttcctagtcccataccaggaacatgccccatttcatgaattatatgtcgactttgagggctatataattgttctggaattagaacttgtgctccccattgttgtaataaatctctcccccataaatttataggtacagaagttataattggttgaatagtcccaggttgtccattgggcccttcacaatgcaaaatataactactttgatatacttcaggggctttaccaactccaactatgttaaattgagtgggttgaattggccacg

SEQ ID NO: 45439 - DNA, 1696 bp, Homo sapien
cgtggctcatcgcagtgacctccttctcaggagtgcagagtggaggtcagtggtggagtgaagacggaccagggttaacatcggcagtgatcacttgacctctgcacacttgactctgggtctttctccccaaaaaaaaccagaacctcagtataatcgtgaggaaaatagacaaatcctaattgagggacattctccaaaatacctgactggccctcctcaaaactgccaaggtcatggaaaaaggaaagtctgaaaaactcacagtttaggaacctaaagagacttgattactaaatggaatatatcctgggatcctggaaaagaaaaggacattatgtaaaaactaagaaaacctgaataaaatgtggcctttagttaataagaatccatcaatattggtgcattcgttgtaacaagtagttgtaacaagtgccacgctaatgtaacacgttagtaccagcgtaactgggtgccaggcgtttgtaaactctgttccgtcttctcaattgttttgtgaatctaaaaccgttctttaaaaagagtttatttagtaggctgggcatggtggctcacacctgcaatcccagcacttgggaaggccaagactggtggatcacttgagctcaggagttggagacatgcctaggtaacatggcaaaaccccatctctactaaaaatacaaaaattagccaggtgtggtggcgcacacctgtagtcgcagccacttgggaggttgaggtgggaggatcgctggagcctcggaggtcgaggtggtagtgagccaagattgcaccactgcactccagcccgggcaaccagagtgaaacgctgtgtccaaaaaataaaaaaagagtgtatgtaaagtgaaaacagagagagtacaagaaaagagggaaaccaggggctcagtggaggtgggcaggggctggtccatgtgcattcagcccacctggttggcagctgcccaggtgtctcctcaggtgtcggaacaggagtttcttccacagccttcagtttgctcaggtgggcatgtggcgatggcagacccttgggctgtgagaaactatgttgctgttttatccaagtcttcacagaccaaagacggggctttgcccagaggaggccttgagaagccaggctggagtttgtggagagagtgtgtgtcactcacaggacatatgacgcatttgcaacatgcgttctcaaagtgggagccacagcagtgttcgttttactattgctgggcctgtaaatggagcgttttatctttttcgtcagctggttcattgaacaagtgtttacagagcacctgctaggcaaatccatcgtgacagagactcggtgtgcccccaaggagctcacagtctagcggtaaagatggtgcataaactccctgacactcagggtggcaacagccaccccacctgctcctccctttcctaatgcccacacggagcagacactcgagggctgcttttaggagtgctgactacatgcttccctacctccatgtaggcatgtgtgtacacaagcgtgtcctgttttcaccttttcacaaaactatgtcaaaagtgaaacattttggaatacatttccagttatgcaaaatgtttaaaatatgaatttcttcggttaacacaaattaggcatgaaatgtaggcaaccctgtttaccaagaaacatcagggtgcg

SEQ ID NO: 45440 - DNA, 1010 bp, Homo sapien
cgtgtgagtgggcacggacagtacaggtgtgagcgagtggacacgagacacaggtgtgggagtggacacaggtgtgtgggagtggacacagaacaggtgtgaacatggacacggacacgggtgtgtgtgagtggacaggaccaaggaaggggcacaaccccgtggaaaagggtgatgctgggggtgaggagcctggtcctgtgggaacgtggcctctgaacgggtgcctgcttcccaggaagacaaggaggtggtggggaaggcctcctcacccagcccctggagggacctccagaacatcagggagtggacagtgaggatagaggggtgcctccagctttggacccagtcagggtcttttctggaagacaccatgggccccgggtaggcccccacacccagccagaaacccagggccagccccatgcccctccttaaccacactgtgggcctgagcatgatgagatgctggtgaacaggggagggctcttggaagggaaaggaggcccctctgctggcccaggtcagaggagaggcctggcccaagggcctcagaccctgagaggcactgccatgcagacctgcgcctccccagcctccctctccaaatcactgtgtgaacatcagggagtcaggtgcaggcgaacctagaaggagggtcaggtgcaggtgaacctagtagcccacacacgggcagtagggtcagggctgcatccagacagtgggcactcagggccagtccacatggcctccagctggccccaggagcagactttccacatggtatcagacctgggagaagacacagacttcaggagaggaaggcacaggaactcactggcagccacagctggggtcagggatgtgctggtgtcctggatgcagacaggttgatagggccaagggtggccacataaggaagggtcaccgacactcacacccacactcctacctggccccccagaccccaacagaccaacgagcccccacagaacagggccaggatagcg

SEQ ID NO: 45441 - DNA, 1042 bp, Homo sapien
cgccagatgggctcacagggccacaccctctcaccccaagaccattcaccctccgagttgctgctgtcctcctcgccctcctcctcgtcctcttcatcgtcttccaccccatgccgagtgctcaggggcctcagtatccctgaggaacaagaagcagagtccatatgactcccacccacagggtccaccagcaaagtcacagtgggggcaggagggtggccaggctcccaacacccttccctccgctgacttccagcaggtggagaggagccctggggaggaactgggaggtcacaggcctggggacagagttaccaatcccagtaggccttcacttcaaggagggaaggcgctggcaccagaagcctggcaacactgaggttggccccagctgggccagagactggtgagccccctgcaggatgggtacaggtggccctcgtggctctgggaagtccagcagagccctccaggcccacccttcccctgggagcaccacgcaggccccacctctctccgagaatccctcggtgtcgtcctcttcagagctgttcaggtcaaagaggtctttaaattgcttcctgtcctcatccttcctgtcagccatcttccttcgtttgatctcagggaagttcaggtcttccagctggaaggccaaagaaccaggggctcaggtgagagagggcaggggctggcggccacagcagggccaggcatcgccagacccaccaccagggccccatgtggccaatttctagtcccctctgttcccaaatcacaaagccatcctccaagttgtccatcccatgtccaaggtcaaaggcagagcccttcctgcttctcctcacgggcccctggtgcccacatactggcctgggtgacgaggtcagtccagccactccacctgcccggagcctccagcccatcaggcctgagggggcatggcctccccaacctagtgcagcctggggcttcccctccctggaaacgcctggttctggccagttctccaacacctaccccctctccaagtcgaatcatc

SEQ ID NO: 45442 - DNA, 2176 bp, Homo sapien
cccagtcttttcatgtttttaacactgtgtcttgaaaaagagttcatgcttaacaatgaggatacacaaaatttttttaaaaaagaaaaagaaaagttcttccttttaatgaagtctaatttgcccatttttcttgatgtattattcttttggtgtcgtatctaagaaatctttgcctaaaggtcacaaagatttttaaagttttctccaaaaagttttatggttagattttgcatttaggactatgatctatttttagttaatttgtgtatatggtgtgaggtaagaatctgttaatttatttgcatatggatatacagttgtttttgaaccactgttgaaaagactctcccggccgggcgcagtgactcaagcctgtaatcccagcactttgggaggctggggtgggtggatcatgaggtcaggagttggagaccagcctgaccaacatggtgaaaccctgtttctactaaaaatacaagaattagctgggtgtggtggcatgcgcctataatctcagctactcaggaggctgaggcaggagaattccttgaattcgggaggtggaggttgcagtgagccgagatcgcaccattgcactccagcctgggtgacagagggagactccatctcaaaaaaaaaaaaaaagaaagaaaagaaaagaaaagactctcctttctctattgaattgtctttgtcaaaagcagctgaccatccatccatgggctggcccatttctggagttctgggttgattgtttctggagttcggggttgattgtttctggcgtttagggttgattgtttctggcgttcagggttgattgtttctggagttcagggttgatagtttctggagttctgggtggagtgtttcgggagttctgggttgattgtttctggggttcagggttgattgtttctggagttcagggttgattatttctggtgttctgggttaattgtttctggagttcagggttgattgtttctggagtttggggttgactgtttctggagttctgggttgattgttcctggagttcagggttgattgtttctggagtttggggttgactttctggagttcgtggttgattgtttctagagtttggggttgattgtttctggagttcgtggttgattgtttctggagttctgggttgactgtttctggagttcagggttgattgtttctggaatttggggttgattgtttctggagttctgggttgattgtttctggagttctgggttgattgtttctggagttctgggttgattttttctggagttcagggttgattgtttctggaattcggggttgactgtttctgcagttctgggttgactgtggagttcaggattgaatgttttctgaagttcggggttgattgtgtttggaattctgggtaatttccttgtcaatatatattttgccaacgtttcctcccatatgtgatgtcttttcactttttgataatgccatttgaaacataagttttaaattttgatgatgtctaatttttttctttggtcacttatgcttctggtatctgttttagtctattttgtgctgccttaataggatatctgagactgggtaatttataatgaacagaaatttatttctcacagttctggaggctgggaaatgcagatgaaggtgctggcgtctgatgagctccttccttctgtgtcatccctggacaaagaagacagagtgggagagcaggaggggctggaccccccttccatgaggaacccactcccacgataccagcgttcatctcttcgtgagggcagagcctccataagctaaacacctcttaaaggtcccacctcccaacacttccacatgggggtcaagctcccggcacatgagcttttggggccatatccaaaccacagcagtatcctacctaagaagacttttgcccaaggtctttccaaacccaagatcatgacaatttactgctatattttcttctaaaagttttatagttttagctcttatgtctgtcatccattctgttttgttttgctttgtttttgtttttttgagacggagtctcactctgtcgcccaggctggagtgaaatggcgtgatcttggctcactgcaacctctgcctcccaggttcaagcgattctcctgcctcacccttctgagtagcg

SEQ ID NO: 45443 - DNA, 1891 bp, Homo sapien
cgtgcaggtgtgaaccactgagcctggccctggataccttttatttcactttcattttcttttcttttctttttttttctttttgagatggagtttcattcttgttgcccaggctggagtgcaacggcgcgatctcagctcactgcaacctctgcctcccaggttcaagtgattctcctgcctcagccttctgagtagctgggattacaggcatgcaccaccatgcctggctaattttgtattcttagtagagacagggatcaccatgttggtcaggctggtctcgaactcccgacctcaggtgatctgcctgcctcggcctcccaaagtgctgggattacaggcgtgagccatgatgctcagcctcttttatttcattttctttcctaattgctctggcaggaacttcctggagtgtcaaaagtaagaggcaggagtgagcattgctgttttatcgtggcattttgttgacgtgattgcgacgctccgggagtctctgtccaggttcttgtgctgagaggctccttggatcagtgggtttatggttcccatcaagcttggaaaaactccaatcattatttcttcagctattttaccttcttcccctcttctgggaccaactccaattaaacgtatgttaggccactcaacgttgtctcacagctcaccattctatttctctgtttttcagtttttttgtttgtttgtttgttttttgagacagagtcttgctctattacccaggctggagtgcaatggcacgatctcggctcactgcaatctctacctcccgggttcaagcaattctctgcctcagcctcccaagtagctgagattacaggtgcctgcaactacgcccagctaatttttttgttgttgttgtattttttgtagagatggggtttcaccatgttggccaggctggtcttgaactcctgacctcaggcgatccacctgccttggcctcccaaagtgctgggattacaggcataagccaccgcgcccagcctctctgttttttaaaatctgttttattttaaatagtttttattgttatagtttcgagttgactactgttttcctttccagtgtctaacctgttggtacttccccccagtgcatttctcaaatcacacatcataattttcatctctagaagttccccgttgggatttttgtaacttcaaagtccctaacacattcgatatttcctctagcttccacttttctagtttatttctgtttttgtttagagatgagatctcgctttgttgcccaggctggccttggcatcttgagtagctgggactataggcacacacaaccacacctggaatagcttcttggagtaagttgtagcagcagctttcatatccttgtctatgaattctatcatctctaacattgctggaatcttcctgtccatgtggggagggttcatgtgtccgtcatctgggagggtccatgtgtctgtcatctggggagggtccatgtgtccgtcatctggggagggtccatgtgtccgtcatctgaggagggtccatgtgtccgtcatctggcagggtccccgtgtccgtcatctggggagggtccccgtgtccgtcatctggggagggtccccgtgtccgtcatctggggagggtccccgtgtctgtcatctggggagggtccccgtgtccatcatctggggagcatccttgcctgagtgccaggaaggggggacactctcactgtaacgtcagctcagatccttcatgctttcattgctgcctccacatggagatggcatttgccccaaggatttctgtcaagcaggtgacagcctcctgcctgcaacctgcttggtaacattaagcccctggcttggtcaggaaaagtccagccgaaatcc

SEQ ID NO: 45444 - DNA, 1095 bp, Homo sapien
cggctagtgttttgtatttttagtagagatggggtttcactgtgttggccaggctggtcttaataggagattctactttttttttttcttttttgagacggagtttcactcttgtcgctcaggctggagtgcagtggcacgatctgggctcaccacaacctctgcttcctgtattcaagcgattctcctgcctcagcctctggagtagctgggattacaggcgtgtgccgccacacctggctaatttttgtatttttagtagagatgtagtttctccatgttggtcaggctggtctcaaactccccacctcaggtgatccacgcacctcagcctcccaaagtgctgggattacaggtgtgagccaccgtgcctggccaggagattctacttttaaagccactgacggcgtccaactcatagtgagcacccacgcccatctgccagggttcctgcccctgggcagcagctggggtccttgctgagcagaggcaggaggggccaccagcacttgcctctgctcttctggagaggaagagacccccctgctccctgccccctgccagggagcccactccaggatctccggggactgtgttcctcccaccttctttgccacaggacagctcccatctgtgtgtctgtctctctgggtctgtgcccttggcctctgatggtcccctccctgcctctcgaatctggcctcgatttgtggtaggggcctcagggttcctgagggccttggggttcccttgctctgagtgtgggggtggatcctgggctgcagcccaggatggtgccgacacctgggttgggggcaggttgcgtttttcagagacggccgtgatagtatctcccatccccatatcttgaaatgccttctacatgagactctgtgacagtctcagctgggaagaatggggtgtttggcaggacatgacttctgaggctgacttggaagacgccatgcgtacctcgctgtcctgggacagtcgctcttggaacccagctgccgtgctgggagggagcacgccctggcctcaaggagaggccccgtggaggaatcagcattggattccagactcctgagcagcttc

SEQ ID NO: 45445 - DNA, 1220 bp, Homo sapien
cgtgccttcccagtgtatgggtgggggttgagggacaaaattaatgttgcacaaagatatgggggatgcccaatatctatgcaggcaggtggggggatcagtgtctatgcaggcaggtgggggggacatcagtgtctatgcaggcaggtagggggagggggacatcccgtgtctatgagggcaggtggagggagagaattgaggctggggctggggtcagcagtggggctgaatggggcagagtgggggtcaaggagcaggggtggtgctgggcaggccaggaatacccattgtgtggccgtgtgtgtgtgtgcagtgcatggtgctgtgagatcagcatgtgtgtgtgtgtgtgcagtgcatggtgctgtgagatcagcatgtgtgtgtgtgtgtgcagtgcatggtgctgtgagatcatgtgtgtgtgcagtgcatggtgctgtgagatcagcgtgtgtgtgtgcagtgcatggtgctgtgagtgtgagatcgtgtgtgtgtatgcagtgcatggtgctgtgtgagatcagcgtgtgtgtgtgtgcagtgcatggtgctgtgagatcagcatgtgtgtgtgcagtgcatggtgctgtgagatcagtgtgtgtgtgtgtgcagtgcatggtgctgtgtgagatcagcatgtgtgtgtgtgtgcagcgcatggtgctgtgtgagatcagcatgtgtgtgtgtgtgtgcagtgcatggtgctgtgagatcagcatgtgtgtgtgcagtgcatggtgctgtgtgagatcagcatgtgtgtgtgtgtgcagtgcctggtgctgtgagatcagcatgtgtgtgtgtgtgtgcagtgcatggtgctgtgagatcagcatgtgtgtgtgtgtgtgtgcagtgcatggtgctgtgagatcagcatgtgtgtgtgcagtgcatggtgctgtgagatcagcgcgtgtgtgtgtgcagtgcatggtgctgtgagatcagcgtgtgtgtgtgtgcagtgcatggtgctgtgtgagatcagcatgtgtgtgtgtgcagtgcatggtgctgtgagatcagcgtgtgtgtgtgcagcgcatggtgctgtgtgagatcagcatgtgtgtgtgtgtgtgcagtgcatggtgctgtgagatcagcgtgtgtgtgtgtgcagtgcatggtgctgtgtgagatcagcatgtgtgtgtgtgcagtgcatggtgctgtgagatcagcgtgtgtgtgcagcg

SEQ ID NO: 45446 - DNA, 1240 bp, Homo sapien
catggtgctgagagatcagcatgtgtgtgtgcagtgcatggtgctgtgagatcagcgtgtgtgtgtgtgcagtgcatggtgctgagtgtgagatcagcatgtgtgtgtgtgcagtgcatggtgctgtgagatcagtgtgtgtgtgtgcagtgcatggtgctgtgtgagatcagcatgtgtgtgtgtgtgtgtgcagcgcatggtgctgtgagatcagcatgtgtgtgtgtgtgtgtgtgcagtgcatggtgctgtgagatcagcatgtgtgtgtgcagtgcatggtgctgtgagatcagcgtgtgtgtgtgtgcagtgcatggtgctgtgtgagatcagcatgtgtgtgtgtgcagtgcatggtgctgtgagatcagcgtgtgtgtgtgtgcagtgcatggtgctgtgtgagatcagcatgtgtgtgtgtgtgcagtgcatggtgctgagtgtgagatcagcatgtgtgtgtgcagtgcatggtgctgtgagtgtatcagcatgtgtgtgtgtgcagtgcatggtgctgtgagtgtgattgtgtgtgtgtgtgtgcggtgcatggtgctgtgtgagatgtgtgtgtgtgcagtgcatggtgctgtgtgagattgtgtgtgtgcagtgcatggtgctgagtgtgagatcagcatgtgtgtgtgcagtgcatggtgctgtgagtgtatcagcatgtctgtgtgtgtgcagtgcatggtgctgagtgtgagatcagcatgtgtgtgtatgtgtgtgcggtgcatggtgctgtgagtgtgagatcagggaccagggggctagtactctttcctgcacatgagcctgcgtgggctggtcagggctgaatgattttgtctgaagatcccaaaatagctcatgtcgcctgagctccctccctggctgggcctggggcctcaatggccctttgtctttctgaaggcatctgggcctctgtggggggctcagacactgactggggctgggtggggccaggctgcctgcctggttccccttcccctggcccagcccaaggggccctaagcctcattccagtgtcggcctggggcagccaggccccccacgtgactttcagcttgttgggccccctttgctggcagatcccagggtctctctgtgtgggggcaaacttcccaggcagtgtttgaggccccctctgccagcccgtacctggggctcccccacccctcccacattgtggtacctgtcctcctcctgcagagcc

SEQ ID NO: 45447 - DNA, 1104 bp, Homo sapien
ggaggctgaggctatggggactccgtggggggaggctgaggttatggggactccgtgctgggaggctgaggctatggggactccatcgggggaggctgagtctatggggactccgtggggggaggctgaggctatggggactccgtgccgggaggctgaggctatggggactccgtggggcaggctgaggctacggtgactccgtgcagggctgtgaggctacggggactccgtggggggtggctgaggctacggggactccgtggggggaggctgaggctacggggactccgtggggggaggctgaggctacggggactccgtggggggaggctgaggctacggggactccgtgctgggaggctgaggctatggggactccgtcgggggaggctgagtctatggggactccgtggggggaggctgaggctatggggactccgtgccgggaggctgaggctatggggactccgtggggcaggctgaggctatggtgactccgtgcagggctgtgaggctacggggactccgtggggggtggctgaggctacggggactccgtggggggaggctgaggctacggggactccgtggggggaggctgaggctacggggactccgtggggggaggctgaggctacggggactccgtggggggaggctgaggctacggggactccgtggggggaggctgaggctacggggactccgtggggggaggctgaggctacggggactccgtggggggaggctgaggctacggggactccgtggggggaggctgaggctacggggactccgtggggggaggctgaggctacggggactccgtggggggaggctgaggctacggggactccgtggggggaggctgaggctacggggactccgtggggggaggctgaggctacggggactccgtggggggaggctgaggctacggggactccgtggggggaggctgaggctacggggactccgtggggggaggctgaggctacggggactccgtggggggaggctgaggctacggggactccgtggggggaggctgaggctacggggactccgtggggggaggctgaggctacggggactccgtgc

SEQ ID NO: 45448 - DNA, 8372 bp, Homo sapien
cgtatcagctccactttgattaattgctttggcaattccaggtcacatgtgtttccattttagactcattgtgtcaattcctacaaaaaagcctgctgcgattttgactggcagagccgatgttttaacaggattgagtcttttcatcacggacatgctgtctctcttcatccctccgcatcttcttcaatttatctcagcagtgtttatagttttcagtgaacaggtcttgtatatcttttgttaagataattactaagattttactttttgttattacaaatagaatgtaatttctgatttcatgttccgatagtttgctgctactatataacgataaactttgcaccttagccttgatatctgaaatcttgctaaattcacttaatagttctagcaattctctgtagctttcttaggaccctctgcataaataatcatgtcatctacaaataaatacagtttacttcttcctttctaatccttgtgacttcaatttgccttttttcttaccttattgcagtggctgggactttgagtataatgttggacagaagagtgagaatgggtgtcatccttgttcttgattttagggataaaatgctcaatatttcgccatcaaaagtacaacgtctagtgtaggtttttcatagatgttcatttatcagactcagggagtttccttctattcttagtttactgaggtttttttaaaaaaatcataaaacaggtataaatgtttccaaatgtcttttctgcatctatttcagtgatcatcctttccttctttattctagtaatatggtgacgacaaagattcatttatgaatcaaaacaaccttgtatcactaggataaaccacacttggccgaggtgtactgccctcttaggctattgttggatttcacctgccaataccttcgtaaggatttttgcctgtgttcatgaaggatagtggtctataattttttttaggtgtctttgtcaggttttggtattggattatattgcctcataaaacaagctgggaaataggccctcctttttttaaagagagacagggtctcactctgttgccaggctggagtgtagtggtgcgatcatggctcactgccgccttgagctcctgggatcaagggatcctcccacctcagcctcccaagtagctggggctacaggtataattttttttgtacacagggtctcactatattgtccaggctggtctcgaactcctggcctcaggtgatcctcctgcctcagcctcccaaagtgctgggattacacgtgggagccacagcacccgttccccctcctcttttattttctgaaagagtttgtgtaagaatattgtgatttcttctttgaatgtttgatagaattcaccaggaaaccatgtatatttgcaggagttttcttggtaggtaggttctccggtaattaattcaatttcctgaacagaaagaggaccatgcagatttccattgcttttgacaagttatattcttccaagagtttatccattgcattgaaattgctacatttactggcctaaaattgttcatcatagtctcctattattttgagacatggcctcactctgtcacccaggctggagcaaagtggtgtgacctcagctcaccacagcctcagtctcccaggcccaggccatcctcccacctcagcctcccaagtagctggaacacaagcaagtgctgccacacctggctaattttttgattttttgtagagacagggtctcgctatgaaacaaaactgaagcatgatgttgctggtcttgaactcctgggctcaaacaatcctcctgcctcggtctcccaaagtgctgggattacaggtgtgagccaccagagatggcaatagtctattactatgtctataggatccttagaaataatgcctcttttgttcttgatattggtgatttgtgctatctgtttcttttgagaccgagtctcactctgttgcccaggctggagtgcagtggcatgatctcggctcactgcaacctctgcctcccgggttcaagcgattcttgtgcctcagcctcctgagcagctgggattacaggcacccaccaccatgcctggctaatttttgtatttttagtagagacagggtttcaccatgttggccagcctggtctcacttctgacctcaagtgatccgcccaccttggcatcccaaagtgctgggattacaagtgtgagccaccgtgcttggcctatctttctatttgtttgtttgcttttcaaacaggtctctctctgtcgcctgggctggagtgcagtggtgtgatcacagttcactgcagcctcaacctcctgggctcaagcgatcctcccacctcagccttctgactagccaggactacaggctcgagccaccacacccagctcattaaatttttttttttttttttttgtagagatggggtctccttctgattcccaggctggtcttaaactcctgggttcaagcagtcctcccacctatgcctcccaaagtgctgggattacaggcgtgaaccacccacctcacctggctctttcttctttcttaaaattgaccattcttagtagaggtttgtcaatctttccaatcttttagggaaaaaatcagcttttgatattgttaagtttctccatttttctcatgctttctatgccactgatttctgtatttgtctttatttcccttttttggctttgttcttttttccctggcttctgggagtgaatcttaggtctctgctttcatgcctttacacgcacttagttacagagttctaagtattgctttagctacaccaacaattttgatgttatattttcattattattcagttggaaatattttttcttcttctgttattttttccccacctgagttacaaattttttttttttgaaacagtctcgctctgtcacccaggctggagtgcagtggtgcgatcttggctcactgccagctccacctctagggtttttaagcaattctctgccccagccgcccgagtagctgggattacaggtgtgcaccaccacgcccagctaattttttaaacttttagtagagatggggtttcaccatgctggccaggatagtcttgaactcctgtccttctgatccacccacctcgacctcccaaagtgcagggattacatgtgtgagccactgcgcctggccccagcctggaaatattttctaatttcccatttgagttcttctttgacccatggtttattcaatagtgggttaatttccaaacatttgagtttttcctattttatttgtggttgatttctaatttaattcctctgtgctcagaaagcatactttgtatgattcttttaaaattcgttggaacttgttttaggacacagcagttggtctgtgttggaaaatgtatcatgtgcacttaggagtattggcgtaactttttctttttgtttttgagaagagttttgctcttcttgcccaggctggggtgcagtggcacgatctcgggtcactccgtcttttgggttcacaccattctcctgcctcagcctcccgaggagctgggattacagctgcccgccaccacgtccagcgaatttttgtatttttagtatagatggggtttcgccatgttggctaggtcggtcctgaacttctgacctcaggtgatccacccgactcgggctcccaaagtgcctggattacaagcttgagcccccatgtgcagcctgatatgtgtaacttcctataaataccattcaggtcaacatgatgatactgttactcagatcccccatgtcttcactgatgtgtttggtttattgttccaagaatcggagacagagaggttaaaatctccgactatgattgtgggttgtctattgatgtttttggtctattctaagaatcggagagagagaggttaaaatctctgacgatgattgtggattgtctattgatgtttttggtctattattctaagaatcggagagagattaaaatctccaactatgattgtgggttgtctattgatgtttttggtctattgttctaagaatcagagagagagagaggttaaaatctccgactatgattgtgggttgtcttattgatgtttttggtctattgttctaagaattggagacagagaggttacaatctctgactatgattgtggattgtctattgatgtttttggtctattctaagaattggagagagagaggttaaaatctccgactatgattgtgcgttgtctattgatgtttttggtcgattgttctaagaattgcagagagagaggttaaaatctccgactatgattgtgtattgtctattgatgtttttggtctattgttctaagaaatggagagagagaggttaaaatctccgactatgattgtgggttgtctattgatgtttttggtctattgttctaagaattggagagagagaggttaaaatctctgactatgattgtggattgtctgctgatgtttttggtctattgttctaagaattggagagagagagaggttaaaatctccgactatgattgtggattgtctattgctgtttttggtctattgttctaagaatcggagagagaggttaaaatctcctactatgattctgggttgtctattgatgtttttggtctattgttctaagaattggagagagagaggttaaaatctccaactatgattgtgggttgtctatatatgtatggtttttgcagtcactttctgcctacttgtgttttttatatttaaagtgcatcttttagttcagtgtgatggcacatgcccctaatcccagctattctggagactgaggcaggaggatcacttgagcccaggagtttgagcagtactagactttaccttgggcaaaaaggcaagaccccatctcttaaaaaacaaatacatagacggacagacagacacacacaccacagtgcatcttttgtagacagcatgtagtaaatcttgctaatttgtccattttagcaatctctgccttttaactggagggtttaattcattaatatttaatataattatcattatgggtagatgtaggtatgttaatatttaatataattactgttatgggtagatgtaggtatgttaatcgttttctgattgtccctttgtatacacacgctgccctttatttttcagtgattttaggttcatagcaaaattgagcagttaagtacaaggagttgtgcctccccgctgtgcccacccaggcacagccttaccctcagcatcccacttgttgcagctgacacaccgacagtgacacatcaccaccactcaaagtccatggttgacacgagggcgcactcttggtgctgcacgttcttggtgctgagctttggcaagtgtataatgacactatcgttggatttcaggtctaccgtttttaccgtttattatttgttttctgattgtccctgtgttttttgttcctctattctctttctggccctcttttgcgtgatttgaagttttaaaaattcctttccaagttatcttttggccctttagttgtgcttctttccattattctcatagttgttgctctaggaattgcaatttcaaccttgctttttctagtctacttagaactagcattataccactttatgcaaaatgtagacatgtagacaccttgcaactgtacagtccacggatcccctctactactcttcacgttgtggctgtcatatctgcatacattataaacccaagagatgttttaatttttccccagatatttactaattttgatgttcatcattcattcttaaagatctgagtttcactgtagtatatactatcttcagcatttccggtagcacaatttgatggtgacaaattttatcagttttcctttttctgaaaatattttcatgtaatgtttattcttagagaatacagaattctatgctttttttttctttcagcagttccactttcttctggtctccataattactcacaaacttggtcgggcgtggcagctcacgcctgtaatcccagcactttgggaggccaagtgggtgggtcacttgaggccaggagtttgatgccaccctggccaacatagcaaaaccccatctctactaaaaatacaaaaattagctcagcatggtagcacacgcttgtagtcccagctacttgggaggctgagacacaagaatcgcttgaacccaggaggcagaggttgcagtaagctgagactgtaccactgcactccagccttggtaacagagcaagactgtataaaaaaaaatttttttttaaatctcacagactcagtctatcagctcatggtctatcagctcagggtctgtcagctcatggtctatcggctcagggtccattggctcacatctatcaatcagctcagtctattggctcagggtccgtcggctcatggtctatcaatcagctcacagtctgtcggctcacggtctattggctcatggtttatcagctcagtcttcacagtgctgtgctgtgtgtgatctgttgtttttctctggctgctttcaagatttttaaagttaatctttagtttttaatagttttagggctgggtgtggtggcttacacctgtaatcccagcactttaggaagctgaggcaggcagatcccctgaggtcaggagttcgagactagcctggccaacatggagaaaccccgtatctactaaaaatacaaaaattaatcgggcatggtggcacgggcatatagtcccagctacatgggaggctgaggcaggagaatcgcttgaactgggaggtagaggttgcagtgagccgagatcgcaccactgcactccagcctgggcgacaacagcaaaactctgtctcaaaaaaaaaaaaaaaaaaaaaaaaacaaacttttgaagtgatgggtccaggtgtggttttattctcatttatcctgtttgggattcttaaaactaaacatttatgtctttcaccaaatttgaaagtttctggttactgtttcttcaagtacttctgtccactgtgcctctcctctcctggacctctgtaattacccatgtgttagacatgttgatatcacctaaggtccctgaggcttagatatcacctacaggtcccagaggctctgttcatggttttgttttattttcctccaatcacttccacccttttttttttttccagcttggatgatttctattcctctgtctttgaggactctgcctattttctctgttatttcccttctgttatgttcattcagtgaattttaaaatttcagatcttggccaagcacagtggctcacgcctgtaatcccagcaccttgagaggctgaggtaggtggatcacctgaggtcagttcaagacaagcctggccaacatagcgaaaccctgtctctactaaaaaaaaaaaaaaaaaaaaaaaaaaaaaaaaaaattgccaggcgtagtggtgggcacctgtagtcccagctactcaggaggctgaggcaggagaatcacttgaacctgggaggcagaagttgcagtgagacgagatcgtgccactgaactccagcctgggtgacagagtagaactgtctcaaaaataaataaataaaataaaatttcagatcttgtttttttttgagacaagagtttcactcttgtcccccagccccaggctggagtgcagtggcatgatctgggctcactgcagcctctgcctcctgggctcaagtgattctttgcctcagcctcccgagtagctgggattacaggcgaccaccaccaagccctgctaaatttttgttgttgctgtttgtatttttagtagagacggggtttcaccatgttggtcaggcttgtcttgaactcctgaccgcaggtgatccacctacctcagcctcccaaagtgctgggattacaggcgtgagccaccacgcccagccagatcttgtgtttgtttgacctaaaattcccatttggctcatttaaacatgtttcctcgctgagatttccggcactttgttcattatgcgtgcatttcccttttcttcactgagcacagacactaaacctgctccaaagtgcttttttgactattccaacagctaggtcataacacaattgatatctgttgtctttcccttcgagaatggctcacattttcctggctcttcatatgttgagtgattttgaactgtaccctgtacattgcaaacgttacattgtgaagacactggaattctgtgatattcctctgaagagaatcaatgtttctacttagcaggcaattaatttcattagattcaaactgcaaacgctgtcacacctgcg

SEQ ID NO: 45449 - DNA, 1654 bp, Homo sapien
cgattctcctgcctcggcctcacgagtagctgggattacaggcacctgccaccacacctggctaattttttgtatttttagtagagacggggtttcagcatgttggccaggctggtctcaaactcctgacctcgtgatccacctgcctctgcctcccaaagtgctgggatcacaggcgtgagccactgcacccggcccagacagtggactttctatcagtgcgttagtcaccccacactatcatgtggggactgtggctgccctcagggcaaagatgcaaaaacaggaaactgtgctggttgcttcctccaagtcaaaacttccctccaaaatctgccactctccagagccctcagggagctgtttttcatactctgtccatggttatagttgtgctatggcagggtcactctgttagaagtttactctttcccactgaagtagaaccccatcatacggctttctgtgtccagaaaccaaggcgattttagtttctagacggtgggcgctggtgttgcttcccaggtgctcaactctgggcagtaacaagcctgcatggtctggacatggtggctcacacctagaatatcagctacctgggaggctgatgcaagaggactgcttgagcccaggagttcgaagccgaagtgcagacgcattcaagctggtcgagccgggaacgcacctgcactccagcctgggcaacagagcgaggccctgtctcaaaggaaaaaaaaaaagctttggcagcagggaacttggagaacatgggctgaaaggataagtctttttgtgctacagatcctgggtctccaagggatgtaaacctgttcactgtccaacaacagcagcaatcaacacttccagagcacttgccacatgccagacaccacgcgaagggatttatacacacaaactgatttcactaatttcaacaatgccccttatcgccccactttaaatatgaggaaaagacttgcataagaccacactgtgagtaggcggcagggttaggcccaggccaggccctctggctccagaataaactggagtctgatggttttcaactgcaacactcaacaaatatgttcagtatgtctggccaactaccgtaaaagtttatagaaattttcaatttaagaagtaaaggccaggagcagtggctcacacctgtaatcccagcactttggaaggctgaggctggaggatcgcttgagggcaggagttttaagaccggcctgggcaatacaccgaaaccccttacagaaatcagccaggcgtgatggcacatgcctgtgatcccagctacttgggagggaggtgggaggatcgcttgagtccaggaggttgaggctgcagtgagccgagatcgcgccaccacaccctagcctggatgacagagtaagaccccatctcaaaaaaaaataaataaaaagtaaaggcattggatttaaaaaacaatatacccttaaatattagactattaactaaagtaaaaataataagtgtggaccacgcatggtggctcacacctgtaatcctagcactttgggaggccgaggtgggtggatcacgaggtcaggagagtgagaccatcctggctaacatggtgaaaccctgtctctacttaaaacacaaaaaaattagctgggcg

SEQ ID NO: 45450 - DNA, 1547 bp, Homo sapien
gcttcattcttgaagtcagtgagaccaagaatccaccaattctagacacattagcagcaccattcaccacagccaccatgtctcggcagcaccattcaccacagccccatgtctcagcactgttcaccacagccaccatgtctcagcagcaccgtccaccacagccaccatgtctcagcaccgttcaccacagccaccatgtctcagcagcaccgttcaccacagccaccatgtctcagcagcaccgttcaccacagccaccatgtctcagcagcaccgtccaccacagccaccatgtctcggcaccgttcaccacagccaccatgtctcagcagcaccgtccaccacagccaccatgtcttggcactgttcaccacagccaccatgtctcggcaccgttcaccacagccaccatgtctcagcagcaccgtccaccacagccaccatgtctcgacaccgttcaccacagccaccatgtctcagcagcaccgtccaccacagccaccatgtctcggcagcaccgtccaccacagccaccatgtctcggcaccattcaccacagccaccatgtctcggcaccgtccaccacagccaccatgtctcggcaccgttcaccacagccaccatgtctcagcagcaccgtccaccacagccaccatgtctcggcagcaccgttcaccacagccaccatgtctcagcaccatccaccacggccaccatgtctcagcagcaccgtccaccacagccaccatgtctcggcagcaccgttcaccacagccaccatgtctcggcaccgttcaccacagccaccatgtctgcagcagcattgttcaccacagccaccatgtctcggcaccatccaccacggccaccatgtctcagcagcaccgtccaccacagccaccatgtctcggcagcaccgtccaccacagccaccatgtctcggcagcaccgttcaccacagccaccatgtctcagcaccatccaccacggccaccatgtctcagcagcaccgtccaccacagccaccatgtctcggcagcaccgttcaccacagccaccatgtctcggcaccgttcaccacagccaccatgtctgcagcagcattgttcaccacagccaaaaggtgggagcaagtgtccacccacagatgaatggataaacaaaaggtggtctatacagaccgtggaatattctacagtcctgaaaagaaattttggacgcatgctacaacaggaatgaaccttgaaaacactatgctaagtgaaagcagctcatcacaacaggacaaatactgtatgattctactcatgaggttcccagggttgtcgaattcatagagacagaaaagacaacggtggttgccaggggctggggggcagggaggaatggggagttagtgtttaatgggaacagtttcctttcctttttcctttcctcttttctcctttctttcctttcctcctttttaaaatttctttctttcttttagagatgggtttgctctgttgcccaggctggagtgcagtggtgcaatcatagctcac

SEQ ID NO: 45451 - DNA, 1673 bp, Homo sapien
cgtcagctggtccgtctgtcgcagcagccagtgatgaccagcagctaaaccccacacgctggccagcctttttccctcctgtcctttccgtcccagaaccccatccaggccccgtggcctcgtcacctctccttggtctgtgacagcttctcagactttccttggtttagcaaccttgacagttttgaggagtgctgctcaggtgttttgtagagagtccctcagtttgggtttgtctgatgtttttctcatgattatactctggggttatgggttttgcgaagaggaggatggagtcctaagttccagagcccagtgtcccatcaccccattgagtccgggttccaggctctccacacaacccagctctatcatcccatcggggatccacgctctccacacgacccagctctatcatcccatcggggatccaggctctccacacaacccagctctatcatcccatcagggatccacgctctccacacgacccagctctatcatcctctcagggacccaggctctccacatgacccagctctatcatcccatcagggatccagactctccacatgacccagctctatcatcccatcggggatccaggctttccacacgacccagctctatcatcctctcagggacccaggctctccatacgacccagctctatcatcccattggggatccatgctctccacatgacccggctctatcatcccatcggggacccaggctctccacacgacccagttctatcatcccgtcagggatccaggctctccacacgacccagttctatcatcctctcagggacccaggctctccacatgacccagctctatcatcccatcggggatccaggctctccatacgacccagctctatcatcctctcagggacccaggctctccacatgacccagctctatcatcctctcagggactcaggctctccacatgacccagctctatcatcccattggggatccaggctctccacacgacccagctctatcatcccattggggatccacgctctccacatgacctggctctattatcctctcagggacccaggctctccacacgacccagttctatcatcccatcagggatccacgctctccacacgacccagctctatcatcctctcagggacccaggctctccacacgacccagctctatcatcccatcggggatccaggctctccacacgacccagctctatcatcccaccggggacccaggctctccatacgacccagttctatcatcccgtcagggatccaggctctccacacgacccagctctatcatcccatcggggacccaggctctccatatgacccagctctatcatcccatcagggttccgcgttctccacacgacccagctctatcatcccattggggatccaggctctccacatgacccagctctatcatcccatcagggatccacgctctccacatgacccggctctatcatcctctcagggacccaggctctccacacgacccagctctgtcaacactcccctccatcacccagctgaggctgtgcccatcaggtttctccactagtgggactgtaaacaattgcattttatttttttatttttgagacagggtctcactctgtcaccctcctgggctcaggggatcctcc

SEQ ID NO: 45452 - DNA, 2778 bp, Homo sapien
cggccaaaagttctttacatattctaaacactaggcctttatcagacatatgatttgccaatatttttctggaatattgtggctgtcttttcactttcttgataatgtcctttgaccacaaaagcttttagttttgatgaaatccagtttatccatttttttcctttggttactcatgcttttagtatcatatctaaaaatccattgtgccaggtgcggtgactcacgcctgtaatcccagcactttgggaggccatggttgttagatcacctgaggtcaggagttcaagaccagcctgaccaatatggtgaaaccccatctctactaaaaatatgaaaattagccaggcgtggtggtgggtgcttgtagtcccagctacttgggaggctgagaaagaagaattgcttgaacccgggaggtggaggtagctgtgagccaagatcgtgccactgcactctagcctgggcaacagagcaagactccatctcaaaaaacaaaaaaataaaaatccattgcactttgggaggctgaggaaggtggatcacctgaggtcaggagtttgagaccagcctggccaatgtggagaaaccccatctctactaaaaatacaaaaattagctgggtgtggtggcgtgcacctgtagtcccagctactcaagatgctgaggcaagcgaatcacttgaacccgggaggcagaggttgcagtgagtggagatcgcactgctgcactccaacctgggtgatggagcaagactccatctcaaaaaaaaaaaaaaattgccaaatccagcagagtgaaaattacacttatgtttctttctaaaatggtatagttttagctcttatatttaggtcttggatccattttcagttaatttttgtgtatggtgtgagttagggatccaacagcattctcttgcatgtggctatccagttatcccagcaccatttgttgaagagactattctttcccccatggaatggtcctggcatagtatcaaaaaccaattgaccagagctgcaagtgtttatttttggactctcagttccattccattagtgtatatgtctgtctttatgccagtaccacatggttttgattgctgtagctttgtagtaagtcctgaaattgggatatgtgagtctttcaatattgttctttttcaagattattttggctattcaggggccccttacaattccacaattccatatgaattttaagattggcttttccatttctggggaaaaagtccaatgaaattttttttttttttttttgagacagagtctcattctgttgcccaggctggagtgcagtggggcaatctcagctcactgcagcctcgcctcccaggttcaagcgattctcctgcctcagcctccctagtagctgggattacaggcacccaccaccacgctcggctaatttttgtatttttagcagagaccaggtttcactgtgttggccaggctgatctcgaactcctgacctcaggcgatctgcccacctcagcatctcaaagtgctgggattacaggtgtgagccaccacacccagcctcatcgaaattttaataggcattgcattgaatctgtaagtcacgtagcagtggcatcttaacaatatttagtcttccgatccatgaatataggatgtctttccatttttctaggtcttcttccatttctttcagcaatgttttctagttttcagcatacaagtctgtcacctacggtaaatattattctaggtattttattattttgacacttgtgaatagaattattttttaaatttcctttttggattgtccattgctagtgtataaaaataaaactgatttttgtgtgttgatcttgtatccttcaactttcctgaattcacttattagctccgtgtgtgtgtgcactcttcaagatttttatataaggatcatgtcatctggaatagaaacagctttacctcttcctttcaaatttatatgcattttatttcttttcttacatattgccggctacttccagaacaatgttgaatagaagtagcaaaagcagtcatccttgtttgttcctgatctgaggaggaaggccgtgggtttctcataaatgccctcgtcaggttgaggaagttcccttctgttcctaattggttaagtgttttttgttaatatcctagaaggatgttgaaatctgtcaaatgctttttctgtctccactgagatgagtgtgtcttatttccccttcattctattaatgtgttgtatcgcactgattaactttcatatgacaaaccccgcttgatgatggtatagaaccatttaaatttaaatatgctgttggatttggtttgctaatattttaatgaggatttttgtgtctgtgcttataagcaatactggtctgtagtgttcttttctcgaatgtctttgcctgggtggtattaaggtaaccctggcctcatagcatgttaggatgcattctttcctcttttatttttggagtctttgtgaaggattgctgttaattctttgtttgaaataattcaccagtaaagccacctgggttttcctctgtgggaaagtttattattattattactaatactgctgcaatctttacttgttataggtccatccagattttctaatctttagtctgctttattttgctaagaatttgtccatttcaccaggcacggtggctcatgcctataatcccagcactttgggaggccgaggaaggtggatcatgaggtcaggagatcgagaccatcc

SEQ ID NO: 45453 - DNA, 2340 bp, Homo sapien
cgggttcaagcgattctcctgcctcagcctcccgagtagctgggattacaggcacctgccaccacgcctggctaattttgtttgtattattagtagagatgggggtttcaccatgttggccaggctggtcttgaactcctgacctcaggtgatccgcctgccaaagtgctgggattataggcgtgagccatgatgctcagctgcaaagtattttaaatttcctttgtaagcttttctttgacccattggttgcttaagggcctgttatttaatttccacatatttgtgatttttccaattttccttctgttattgacttctaatttcattccattgtgtcagagaacatactttataatttcaaccctttaaaaattattgaaaaattattggagctggtgtgttggcacatacctgtaattccagctactcaggaggctgagatggaaacattgcttaagcccaggagtttgagtccagcctgggcaacacagcaaaaccccatctttaaaaaaacaacaaacttactattcattaagtggatcattaaaaaacaaaaacaaaaaacacttgaaacttgtttatgtcccagcatatggtctatcctggagaatatccatgtgcactggagaaggaggtgtatcctgtttttgggtgtagtgttctgtagatgtctgtgccgagaccagctcggtcggggagaccctaacccggcggcgctagaggaattaaagacacacacagagaaatacagaggtgtgaagtgggaaatcaggggcctcacaaccttcagagctgacagccctgaacagagatttacccacatatttagtaacagcaaaccagtcatagcattgtttctatagatattcagttaactaaaagtatcccttacgggaaacgaagggatgggccaaattaaaggaataggttgggctagttaactgcatcaggaacacgcccttaagacacagatcgctcctgctattgtttgtggcttaagaacgcctttcagcggttttccgccctgggcgggccaggtgttccttgccctcattcccgtcaacccacaacctcccagcgtgggcgttagggccattgtgaacatgtcacagtgctgcagagatttgtttatggccagtcttggggccagtttatggccagattttgggggggggcctgctcccaacatgtctgttaggtctgtttggtttataatgttgttcgagtcttctatttactcgttaatcttctgtctctgtattgaaagcgggatattcagttgtctacttctcccttcagatctgtcagttttttgtatatttcgaggctctgttgttgggtgtgtgtatgtttatgattattagatcttcttggtttatcgttataaaaattttcctttaatctgcagtaataatttttgtgtaaagtctattttctgtgatatgagtgtagacactccagttggtataagtgtagacactccagttgatatgaatgtagacactccagttggtatgagtgtagacactccagttggtatgagtgtagacactccagttcgtatcagtgtagacactccagttgatatcagtgtagacactccagttggtatgagtgtagacactccagttggtatgagtgtagacaatccagttgatatcagtgtagacactccaattgatatcagtgtagacactccagttggtatgagtgtagacactccagttggtatgagtgtagacactccagttcgtatcagtgtaaacactccagttggtatgagtgtagacactccagttgatatcagtgtagacactccagttggtatgagtgtagacactccagttgttcatatcagtgtagacactccagttggtatgagtgtagacactccagttggtatgagtgtagacactccagttggtatgagtgtagacactccagttctactttggttaccgtgtgtggtacatctttttccatccctttactttccacctatttttgtctctgaaactaaagtatcttttgtagatggtatatcatgtttttttaagaaactccgtcaatgtctattaattggaaagtttaattcacttacatttaatataattactgataaagggccgggcacggtggctcacgcctgtaatgccagccctttgggaggccaaggcaggtggatcacaaggtcagggattgagaccatcctggctaacacggtgaaaccccgtctctactaaaaatacaaaacattagccaggcgtggtggtgagcaactgtagtcccagctgctcgggaggctgaggcaggagaatggcgtgaacccaggaggcg

SEQ ID NO: 45454 - DNA, 1004 bp, Homo sapien
cgcctcagcttcccagggtgctgggattacaggcgtgagccaccacgcctggcttagtgtagcattttaattaccttgtcatttattttactatatgtttttgagttattttagtggttgtcctgaggattaccattaatattgtatcttaatttactacaattagggtgagtgtggtggcttatgcctgtaatcccagtgctttgggaggctgaggcaagaagatcatatgaggccaggcatttgaaagcagcctgggcaacatagtgagaccccatctctaaaaaacaaaattagctcagcatgggagtgtgcacctgtagtcctcctagctatttagggggctgagatgggaggatcacttgagcccaggaggtcaaggctgcagtgagccacaatcaaaccacattaccccagcctaggtgacagaacaagaccctgtttctaaaataaaaaatgttttaaaataaacaattcagttttttattaataccaagttaatttcaaaagcatacaaaaacacactgctcctaaaagtatacaaaaacactcctcctacacagccccacccctctcatgctgttgtcacaaattacagctcagtatatttgtgtccatcaacatggattcataattattgttgtatacagttgtcttttaggacaaaacaatcacatacaaaaaaatacatgtatgctgtctcttatatttaattacacaatgaccttttctggggctctttatttcctcctgtgagttccagttactgtctagtgtcttttcatttcagcctgaaggacggtagggcgggtctacctttgtttatctgggaatgtcttaatctccccttcatttttgaagcagcttttgctagatgtagaatttttggtcaacagtatttttacttttgggaatttgtgccatcccactgcctgcccacctcacgacctctaatgagaaactggctgttcatctttctgtggatgcctcatacataacgagcg

SEQ ID NO: 45455 - DNA, 1522 bp, Homo sapien
cgttctctgtcttttggaagtttgctgatgaggtggtggatctctgagtttatcctactttgagttcattgagcttcttgaatgtgtaggttgtttttcattaaactgggaagttttctgccattattttttcaaatattgtttctgctcctttctcttctctccttctgggactcccattatgcatatgttggtccatttgacagtgtcccacccacaagtctctgaggctttatttttcttccctctctctctctctttcattttttgttttgagacagggtttctgtcacccaagatggagtgcagtggtgcaatctcagctcactgcagcctcctccttctgggctcaagcaatcctccggcctaccagcctcccaagtagctgggactacaggcacgcaccatcacatctggctaatttttgtatatttagtagagacgaggtttcacaatgttggccaggctggtctcaaactcctgacctcaagcgatccccctgccttggcctcccaaagtgctgggattacaggtgtgaagccactgcacccggcctcctttttctttctgttcctcagactaaataatctcaattggcctatctgcaaacaattcaaatctgctgttgagcacttctagtgcatgttttatttgttctacttttgttctacttttcaacttcagaatttctatttgattctcttttataatttttctctcttcaccagtattctctattatttgataagacatcatcgtcatacttttttttttttttttttagttttagtagaggcagggtttcaccatgttggcaaggcttgtctcgaactcctgacctcaggtgatccacccacctcagcttcccaaagtgctgggattacagacgtgagccactgtgcccggcccatacttcttttttttagacagtctcactgtgtcacccaggctagagtgcagtggcacaatctcagcttaccacagcctctgcctcttgggctcaagcagtcctcccacctcagcctcccaagtaggtgggactacaggcatacaccaccacgcttagctaattttgctaattttttggtagagacaaggtctccctatattgcccaggctgatctcagactcctgagctcaagcgatcctcctgcctcagcctcccaaagtgctgggactacaggtgtgagccacgcgcccgaccaacttgtgtatttctagtagagatggggtctcaccatgttggccaggctggtctcaaactcctgagctcaagcaatcctcctgcctcagcctcccaaactgctgggactacaggtgtgagccacgtgcctggccctcacactttctgttagtcctttcaaatgggatcttccaaggaactactagacataagaaaacaaataatgacaatttttttttataaatgaggtctattttgctatctccagttctggggatgcatgctgttggttttttgaggcaaccattgagctggggagcagaggatgaaaccagagca

SEQ ID NO: 45456 - DNA, 1175 bp, Homo sapien
ccgagccagtacccagccccgagcccagtacccagcctccagcccagtacccagccccgagcccagtacccagcctccagcccagtacccagccccgagcccagtacccagcctccagcccagtacccagccccgagcccagtacccagcctccagcccagtacccagccccgagcccagtacccagcctccagcccagtacccagccccgagcccagtacccagcctccagcccagtacccagccccgagcccagtacccagcctccagcccagtacccagccccgagcccagtacccagcctccagcccagtacccagccccgagcccagtacccagcctccagcccagtacccagccccgagcccagtacccagcctccagcccagtacccagccccgagcccagtacccagcctccagcccagtacccagccccgagcccagtacccagcctccagcccagtacccagccccgagcccagtacccagcctccagcccagtacccagcccccagcccagtacccagccccgagcccagtacccagcccccagcccagtacccagcctccagcccagtacccagccccgagcccagtacccagcctccagcccagtacccagccccgagcccagtacccagcccccagcccagtacccagcctccagcccagtacccagcctccagcccagtacccagccccgagcccagtacccagcccccagcccagtacccagccccgagcccagtacccagccccgagcccagtacccagccccgagcccagcacccagcctccagcccagtacccatccccgagcccagtacccagcctccagcccagtacccatccccgagcccagtacccagcctccagcccagtacccatccccgagcccagtacccagcctccagcccagtacccagccccgagcccagtacccagcctctagcccagtacccagcctccagcccagtacccatccccgagcccagtacccagcctccagcccagtacccatccccaagcccagtacccagccccgagcccagtactccacgacgccgaagggccgggtcctgcctccagggctgagcaccttccccagtgtccctgtgccacccttgggctctccacactccaggtcccatgttggggggggaggggagcaga

SEQ ID NO: 45457 - DNA, 1358 bp, Homo sapien
cgttcacagcaccagatgaaaatcaggaagcacccacttgtcctgaagtgggtccctggcagcttgaacatccccacaccccaggccatctgctgaaaagcctgaggcaaaggcctagctggctactctgccccatggcctgtccctcctctaccactgcctgaccctcatcactggggtaagtcttgaaaccacagactccacttcattctttagaaaaatggttttaactgttctaggtcctttgcctttgcatgtagcttgtgtagtataaaaaactgagattttgttaggactgtgtgaaatctacagattcactcaaggggaatgatttagcaacatttgtaggaagccagctctgaactgtcagagtgggcacgcctgggcagcaccaggggcagaacagccacggaacccagtgcacggaggggacgcagctaatgcacaggcaggaaaaggggtcagaaatcccgaagtcaggaaggaagctgtcgtcagcagcatcagataccagaggctaagaaactgaggactgagaacagcccctcggcaagtggcaattcggaggggttccctggagaccctgaaggagagcagagggcagggctgcagagagcaaaaggcatcccccagtgagggggaggtccgcggggacgggagcagcagtgccatagagggaaatgggaggggcagtaggaacacacattctctctctgaagggaggctttcctgagacccaggaccagcacagagccacacacggttgtggggaacaacggaagcgatgggaggggaccaagataaaagcacaagtgacagggttggggctggcaacggccgcaccacacccaggggctgccccctcttctcccaactgtgtccagccctgttgggggagtagctcatctccaccagcaactgacctagctggtgaagttgagggagactgggtgtggatacagaattaatattcactatttatttttaaaaaactaaaaccacaaaacaaacaaaaaaaatgtaaagctggcataattttgcttgtcaaagaccaccacccattttggtttttttttttttttttgagatggagttttgatcttgtcacccagggtggagtgcagcgatctcggctcactgcaagctccgcctcctgggttcaagcgattctcctgcctcagcctcctgagtagctgggactacagggccccaccaccacgcccagctaattttttgtatttttttagtagagacaaggtttcaccgtattagcaaggatggtctggatctcctgacgagtttcactcttgtcacccaggctggaatacaacggcacgacctcggctcactgcaacctc

SEQ ID NO: 45458 - DNA, 1300 bp, Homo sapien
cgccatgattgtaagtttcctgaggcctccctggccacacggaactgtgagtccattaaaccccttttctttataaattactgagtctcgggtacatctttatagcagcatgagaaccaactcatacacctgtagacagccacacattccacctcctttcagtctccacctgcaagagatctacagacttggcctctctaaccggtttattcctcctcagagaaccaccaccagcagcctgtttagtgtctgctcccaacctgaggatgtcaatggccagggcttggctgctcaccccacacacccagggcctggagtgcagagctcagccagggcacccaacgcgtgctcccaaatgtgtggcctcagcaccacccccaaccctgcttcttgttctggggtccctgactcttgcaatccttgttcaccacagccttcccactctcattatcttctctaacgcaaaatgtcatcacttctcccatcaacaccacaggagcctcccaactccccccgtgggtccagaaggtctgagcttctagtctcttcccatttcaaggccctcctgtacccataagtcaacatactgttccgatcacccactcccccatccacccttcaggatactccacagccaagcaaataaacatcaacacgtcctcttgcctgccagccccttgacagaggcagccccagccagccctcctcattcccagctcccaagacagagcagccccagccagccctcctcgttcccaactcccaagacccagcacggcccaggtcccactccaaagtcctgaccgacacactccttctcacagctgcttcccagcctagcctgtactggaaactccccaggcccttcccggcatagccagagccaccgccttcagaggcctccctgatttccctgccaaatgcctcccactctgtcacacatcactggcctccatgtgaccccacacacaacgcagggcccttctgggccccagcgggttcctctgcctaaggagtgcctccccaggagggcccccaccagggatggggttacagtcctgcctgggaaggaagtgcttccacacagtggcatccccagctcctggctaaagaagccaatgggccagggatctcccctcaggccaacacctggtgatggccacagtgatgaccccaagcagcaccgccacacaggctgtcctttcgacactcaccctgaagctaacactctgccatatacaaaataattcactggacaattcaagtgcaggtgggtctgggcttagctaagtggccaggc

SEQ ID NO: 45459 - DNA, 2152 bp, Homo sapien
gggggcaccctctgctttggcaaccaagaaaacatcccccaacccagttaccacctcctgcccccacctcctccagcccccagggttggaccagaaagccttggctgcctctgaacagcagggattgtctggccaggggatgcttgagggacagagaacccagcctggagggtgcaaactgaggaaggtctcagtccctttagaaagtttgttttgccaaggttaaggacacacccatgacatctcgggaggtgcccaaggtgcatgtggcacagctcgcttttatacattttagggagacatgatttatttacacgggttcaatctgaaagagcaggataaattggggtggtgtggggagacctctatgttataggcagattcaaaatgatcctgaccgacagtggttgaaagagttattatcaatagaaaggaatgtctgggttgcagtaaggggttgtggttttccacgcagctgaagcctcgggttgccggcttcagagagaatagattgttaatgtttcctatcagacttaaggcctgtgttgatgttaatgctagtcagcttttcctgaatttcaaaagggaggaggcatgacccacgaccccttcccgccatggcctgaacaagttcccaggttaacactggaacgcccttggctgagaggaagggtccatttggacggctgggggggccttagaatttaatttttggtttacattcacccccttctggccaagatttgccagaggcaacatccatgtccaccaaatctttattgtgtctcagcgttgctgggcgagtgtggctgcccaccctcagtcaatcctgtccctcagtttgactccctatgacccagggacttacagttaaaagatttacagcccattaaattttgtaggccagataggaatggacatggaccagcattcattacctcttaaaacaatttttttttttaaagttggagtctcactctgtcgcccaggctggagtacagtggcatgatctcggctcactgcaacctccgcctcccaggttccattgagtctcctgccccagcctcctgagcagctggaactacaggcatgcaccaccatgcctggctaatttttatatttttgtagagacagggtttcaccatgttggccaggctggtcttgaactcctgacctcaagtgatccgccctccttggcctcccaaagtgttgggattgcaggcatgagccaccacacccgatctatcatgtaacatttttataaattccttttttaccaaaggtattgcagcttacacagaccgttcacgacatgtggactttctagtttgtgctgaacatccctttttttaaacaaccagtcatttatttaaggacaaaaatttaccatacaagattctttctcatataaaattattttttttaaccttacttaacaaaaagacctctttatatctataactttccttggtctctcttatttccttgttctttttaactcattttatacataaactttaaataagctttgaattagacaaaattatttaccttataataagaatttttgtagaaagaacgttttcctataatttttttttttttagatggagtctcactctgtcgcccaggctggagtgcgatggtgcaatctcggctcactgcaacctccccctcccaggtccaagtgattctccggcctcagcttcccaagtagctgggattacaggcatgtgctaccacacctggctaatttttgtatttttcagtagagacggggttttgccatgttggccaggctggtctccaattcctgatctcaggtgatctacctgcctcggcctcccaaagttctgggattacaggtgtgagtccccatgcctggccttcagctgggtttagagttttacaatgcttatgccaagttttgaccccttataaatcaataaatgcaaacaaaaatgtatgctgacagtttttaagacactccttatattactttaccaatacttttggccgggcacggtggctcacgcctgtaatcccagcactttgggaggccgaggcaggtacatcacgaggtcaggagatggagaccgtcctggctaacatggtgaaaccccgtctctactaaaatatacaaaaaattagc

SEQ ID NO: 45460 - DNA, 2152 bp, Homo sapien
cgctccattccctgtgtctctgctccgtcccgtgtctctgctccgtcccgtgtctctgctccgtcccgtgtctctgctccgtcccccgagtctctgctccgtcccgtgtctgctccgtcccgtgtccctgctccgtcccgtgtctctgccccgtcccccgtgtctctgctccgtcccgtgtccctgctccgtcccgtgtccctgctccgtcccgtgtccctgctccgtcccgtgtccctgctccgtcccgtgtctctgctccgtcccccgtgtctctgctccgtcccgtgtctctgctccgtcccgtgtctctgccccgtcccgtgtccctgctccgtcccgtgtctctgctccgtcccccgtgtctctgctccgtcccccgtgtctctgctccgtcccgtgtctctgctccgtcccccgtgtctctgctccgtcccccgtgtctctgccccgtcccgtgtctctgctccgtcccgtgtctctgctccgtcccgtgtccctgctccgtcccccgagtctctgctccgtcccgtgtctctgctccgtcccgtgtctctgctccgtcccgtgtccctgctccgtcccgtgtctctgctccgtcccccgtgtccctgttccgtcccccgagtctctgctccgtcccgtgtctctgctccgtcccgtgtctctgctccgtcccgtgtctctgctccgtcccgtgtccctgctccgtcccgtgtctctgctccgtcccccgtgtccctgttccgtcccccgagtctctgctccgtcccgtgtctctgctccgtcccgtgtctctgctccgtcccgtgtctctgctccgtcccgtgtccctgctccgtcccccgagtctctgctccgtcccgtgtctctgctccgtcccccgagtctctgctccgtcccccgtgtccctgctccgtcccgtgtccctgctccgtcccgtgtctctgccccgtcccgtgtccctgctccgtcccccgtgtctctgctccgtcccccgtgtctctgctccgtcccgtgtctctgctccgtcccccgtgtctctgctccgtcccgtgtctctgctccgtcccccgtgtccctgctccgtcccgtgtccctgccccgtcccgtgtctctgccccgtcccgtgtccctgctccgtcccccgtgtctctgctccgtcccccgtgtctctgctccgtcccgtgtctctgctccgtcccccgtgtctctgctccgtcccgtgtctctgctccgtcccccgtgtctctgctccgtcccgtgtctctgccccgtcccccgtgtctctgctccgtcccgtgtctctgctccgtcccccgtgtctgctccgtcccgtgtccctgctccgtcccgtgtccctgctccgtcccgtgtccctgctccgtcccgtgtctctgctccgtcccgtgtctctgctccgtcccgtgtctctgctccgtcccgtgtctctgctccgtcccgtgtccctgctccgtcccccgagtctctgctccgtcccgtgtctctgctccgtcccgtgtccctgctccgtcccccgtgtctctgctccgtcccccgtgtctctgctccgtcccgtgtctctgctccgtcccccgtgtccctgctccgtcccgtgtctctgctccgtcccccgtgtctctgccccgtcccgtgtccgtcccccgagtctctgctccgtcccgtgtctctgctccgtcccgtgtctctgctccgtcccgtgtctctgccccgtcccccgtgtctctgctccgtcccgtgtctctgctccgtcccccgtgtctgctccgtcccgtgtccctgctccgtcccgtgtccctgctccgtcccgtgtctctgctccgtcccgtgtccctgctccgtcccgtgtctctgctccgtcccgtgtctctgctccgtcccgtgtctctgctccgtcccgtgtctctgctccgtcccccgtgtctctgctccgtcccgtgtctctgctccgtcccgtgtccctgctccgtcccgtgtccctgctccgtcccgtgtctctgccccgtcccccatgtctccgctccatcccatgtccctgctcatcccccctgtccccaggcctgcctggtgtcctgcttccagcagctgatggtggagacctgctcctgtggctactacctccaccctctgc

SEQ ID NO: 45461 - DNA, 1315 bp, Homo sapien
cggaagaggagagctgccctccaccaccactgtctcctcctcctggacaacagagtcaggacactgctgagatggggtgaagcataattgttgcactgagactcaaaactacaggcaagaaggtttgaaaatacagaaacatttcacaaatcatctgcctcctctcgagtagtatctggcttgttctaaacatgcaaatgcagtgagacgggctgcctggtacacacacatcgccccggaatcatgaccttaggccccagggccaccttctgtaattttttttttttaagccacaaagtctcggccaggcaagatggttcacgcctgtaatcccagcactttgggaggccaaggtgggcagatcacctgaggtcaggagttcaagaccatcctggccaacatggtgaaaccctgtctctactaaaaatacaaaaaattagccaggcgtggtggcaggtgcctgtagtcccagctacttgggaggctgaggcaagagaattacttgaacccgggaggtggaggttgcagtgagccgagatcgtgccgttgcattccagcctgggaaacagagtgagactccatctcaaaaaaaaaaaaaaaaaaaagggttgggcgcggtggctcacatcggtaatcccagcaccttgggaggccgaggtgggtggatcacaaggtcaagagatggagaccatcctggccaacatggtgaaaccccgtctctactaaaaatacaaaaaattagccaggcgtggtggcaggtgcctgtagttccagctacttgggaggctgaggcaggagaatcacttgaacctgggggatggaggttgcagtcagccgagattgcaccactgcactccagcctggtgatagggcgagactccgtctcaaaaaaaaaaaaagaaaggagtgaaaccccatctctactaaaaatacaaaaattatccgggtgtggtggtgtgcacctgtagtccgagctactccaagggctgaggcagaagaactgcttgaacctgggaggcaaaggttgcagtgagccgagattgtgccattgcactccagcctgggcgacagagtgagactcggtctcaaaaacaaaacaaaaggacagggtctcactgtgtcacccaggctgaagggcagtggtgcaaacatcttggcccactgcagcctcaaattcctggcctcaagcgatcctcggcctctcaaagcaatgggattacaggcgagatccatcagttttttctttttttttttttgagacagagttttgttcttttgctcaggatggagagcagtggtgcaatctcagaatcac

SEQ ID NO: 45462 - DNA, 2237 bp, Homo sapien
gaggttgcgatgagctgagatcgtgccattgtattcagcctgggcaacaagagcaaaactccctctcaaaaataaataaataaataaaaataaaaataaaaaaattagctgggcatgatggtgcacgcctgaagtcccagctactctggaggctgaggcaggagaatcgcctgaacccaggaggcagaggttgcagtgagctgagattgcaccattgcactccagcctgggtgacaaagcaagactttgtctcaaaaaaaataaataaaaataaaaattaggccaggtgtagtggtgcacacttgtgatcccagctaggaaaggctgtgacaggatggcctgagcctgggaggggaggacgagtatgagcgtgagaatgattgtgaaaggatgactataaattgagtgtgaattagtgaattggtgagtgtgaagtagtgcagatgggtgtgaattcgtgagactgtgtgtgaatgagtgtggatgggtgtgaactggtgattgtgcatttgtgaattggtgtgaattgtgtggtgtggatgagtgtaaacgggtgtgtaaattagtgaattggtgagtgtgaagtggtgtggatgagtggatggatgtgaatgggtgagagaatgaatgagtggatgagtgtgaactgatgagtgtgaatgggcgagtgtgaatgtgtgaatgggcgagtgtgaatgtaaatgagtgtgaatggattggtgtgcgtgaatgagtgtgaacgaatgtggattggtgtgtgtaaatgggtgtgtgaatgtgtgaatgggtgtgaatgagtggattggtgtgaatgggtgaatgactggattggtgactgtgaatgtgaataaatgtgaatgagtgtgattgaatgagtgtgaattagggtgaatgggcgagtgtgaatgtgtgaatgagtggattagtgtggatgggtgtgaaagggtgagtgagtgaattgattagtgaggattggtgagtgtgaatgtgggtgagtgtggatgggtgtgaaggaatatgaattagtgtgagaacgagtgtgaaatgagtgtaaatgagtgggaattagtgaattggtgtgaagtgtggatgagtgtggatgggtgttaattggtgagtgtgaatgtgtggatgggtgaattaaattggtgagtgtaaattggtgtgtgtagtgtgaataagcgtgtggatgagagtaaacaggtgactgagtgaattggtgtgaagtagtgtggatgagtgttaattggtgactgtgttaaagcgtgggtgtgaattggtgtctgaatggattggtgagtgtgaattggtgagttggtgtgaattggtgagtgtgaattggtgagtgaattggtgagttggtgtgaattgaattgtgtgaatgagtggattggtgagtgaattggtgagttgaattggtgtgtgtagtggatgagtgtggatgaatgtgaattggcgagtatggatgtgtgaattggtgagtgtgaatgtgtggattggtgagtgaattggtgagttgaattggtgtgtgtagtgtggatgagtgtgaattggcgagtgtggatgagtgtgaattggtgagtgtgtgaatgtggattggtgagtgaactggtgagttgaattggtgtgtgtagtgtggatgagtgtggatgtgtggatgagtgtgaattggtgactgttgagtgtggatgtgtgaattggtgagagtgaatgtgtgaattggtgagtgtgaatgtgtggattggtgtgtgtagtgcgaatgagtggatgagtgaattggtgactgtgtggatgagtgtgaattggttgtggatgtgtgaattgagtgaattggtgagttgaattgtgtgtagtgtgaatgagtggatgagtgtgaattggtgactgttagagcgtggatgagtgtgacttggtgtatgaatgagtgtggattggcgagtgtgaatgagtgtggattggtgagtgaattggtgagttgaactggtgtgtgtagtgtggatgagtgtgaattggtgaatgtcgataggtgtgaattgttgagtgagtgtatgaatgagtgtggatgggtgtggattggcacgtatgaattggtgaatgtgaactggtgagtgtgaattagtgtaaattcagttcagtggatcaggagcaacttattttttatttattttttgagacggggtctcactctgtcccccaggctggagtgcagtggcaccatctcggctcactgcaagctc

SEQ ID NO: 45463 - DNA, 1048 bp, Homo sapien
cgtacagctcgagtctactgatgtttaaagatggtctcggtggttgggccccctagaataaactgagtccaacacttctacacagttaagtttcactgagctctctgatactgggagcaaggtggcagggtttagggttttgcaaacttcagtggttatgtggggattttcacagagcaagctttggtatctagttagtctagaattcattagctaatgatgtcctttggtatttattaaagtcaccacagcatggggggactttaggttttgcctaagagttagcttatctgcttcttgtgctaacagggccgttgctgccagggcccttggacaggggggcagcctttggaaaccccgtctagttgttttgagagataggccactggccttggccagggctctacggtctgggttaaaactccaactgctattttttctctttctgacacatagagtgtaaagagttttgtcaggtcaggtagcctcggggctggggctgacatgagtttttctttttgactcatgaaaagctcgttgctgttggttggaatggatgtagtttatctaatctacatttttattgactgtcatctaccaaaatattgacttaaatcctgtaactatttgatttcaagctttaaattgatctggtgtcccttgtggggctccaattgcgtctaaatagatgtgagagttgaaagacccataaggggcttctctcgctttacgatgtctttttttttttttctcctctggttgatgaaatgccagggtgaaagggatagccaaacggactaaagcacaagtgccactctagttattcggcagagtgcccagtacaggtccaccacaataccaccacacatccgctcacatccgctcagggatgaacaagggctgactgattgataagctctcgaaaattcttaagctcactgcatcccttccagtctccaaggactgctaagtctcctccctgccgtgagagacacgaagggaacttagttttgggagacggaagctggatggccctcgggggctgacc

SEQ ID NO: 45464 - DNA, 1077 bp, Homo sapien
gagcttgcagtgagccgagatcacgccactgcactccagcctgggcaacagagtgagactccgtctcaaaaaaaaaaaaaaaaaaaatagtactcaggaggccttattacttttaaattatacaacattttttgcataaattttttataacattttgttttacaactttcgccgacaattcttcaacatatctcaactttctgccttattacaaacttttaaacaaccagttaatatatttcaggacaagaatttaccgtataacatgcttttcacataaattcagcctcccctttttttttcttttttaaagcgaactttttttatgtctttggactagactgtctgaggccacaagattaaaagttaccattaacatgttacactgttaacttttagcaaacttcgcttttgttgaaaaccttggaagtttgggatttcaattatcctttgctattaataagaccttgtttagtctaaattaacttagaattggtatagatggcctctttttctctctgctggtctttccttgcctctgccagccgcttatgctgctgttctcttaactaccgtaggggggagggggtctaaaacctgctctaactgtccatgtacggaaactggcctgggtgccttggcttacacgttaccttgtgtcatacctttgaaacaagggacctgtccaggcttccttctgatggccaacccacctctaatgctgacaagtctatttcacacaaagttgtaagttttcctggtgtcagagtaacaccgtaatctcccttaaattctttcttgaaaaattttttttaacatagttcctagtggggtgggcttatctgtgcctgacccacgcttcttcaagacaaaacaccacgctcacaccacaaaacaaaaaacaggtaaaaagggcacacacacacttttgcagtttacaccaaaccaaaatcaaaaccaaaatcagagtatccagaaatccaagccaggtcaaaaccaaaaccaaagtatcacatgatctcagtcaagtcaaaaccagaacaaaggtgctaatgcaggcacgccgtgggcgatcag

SEQ ID NO: 45465 - DNA, 1588 bp, Homo sapien
ggcacctgtagtaccagctactcgggaggctgaggcaggagaatggcgtgaacctgggaggcaaagcttgcagtgagccaagatcacgccactgcactctagcttgggcgaaagagcgaggctccgtctcaaaaaaaaaaaaaaaaaaaattagctgggcgtggtggtgggcacctataacctcagctacttgggaggctgaggcaggaggatcgcttgaacccaggaggcagagattgcagtgagccgaaatcatgccattgcactccagcctggacaacaagagcaagactccatcttaaaaacaaacaaaaaaacaacaaaaaaaattagctggccatggtggtgcacacctgtagtcccagctactcaggaggctgaggcacaagaatcatttgaacactggaggcagaggttggagtgagctgagagggtgccactgcactccagcctgggtgacaaagtgaaactccatctcaaaaaaaaaaaaaggttagcatatctaaaagttacatctgattgtgttttagatttgtctgattttttttatggtctcttgatacatgcttgctttttagattacagtttccacttcttaaacatatttcatatatagttattttatattctgtactaaataattccagtgtcctagtctttgggggtctaaatctgtgactggtgtttctgccgattctcatcagtagcatggtgtttctctgaacgtttggttgtttaattgtcagctgttatcggagacaattctgaggtccaacttggggatgcttccctccagagactattccccttttccaggcgagaccaccctcggccccctcagtgacccttgagacccctggtttaagcagcccctaggcagagaaacatacttgttccctggccgcaggctggctctctgtccctgtgtgtgtccagggagttatctgctttcccaaccacttcccttcatcatccaggcctccacactactctgtctgtttgtttacttagagacagagtcttgctctgccgcccagtctgagtgcagtggtgagctcctagctctctgcagcctcgccctcccaggctcaagtgatcctcctgcctcagcctcccaagtagctgtgactagagtgcaccaccacacccagctaattttaaatttttttgtagagacggggtctcatcatgttgcccaggctggtctcgaactcctaggcacaagcaatcctctcgcctcagcctcctaaagtgttgggattacaggcatgagccaccccacctggccttatttatttttgctgtttaattttgggggagactcggagatatttactttcttggaaacacaacagtctattaaaaatgtacgctcatagtaattcatccagaagttggttgttgctggaaggccttttaagggatctagtacatcatattgccagcagggctcagcctgtgaccagcaaggtctgggctccgtctggggccagggtcaaggctcattccgtggccttgagcacagcctggtgtgtggctgggtcgagtccagcagaagtctcggggttttccagcctccatccgagtc

SEQ ID NO: 45466 - DNA, 1180 bp, Homo sapien
cgcccacctcggcctcccaaagtgctgggattacaggcatgtgccaccatgcctagcgttttgtacttttagtagagacagggttttaccctgttggccaggttggtctcaaactcaactcgggtgatccacctgcctcggtctcccagtattgggattacaggtgtgagccactgcatccagccccatgtatgtatactattaattcccaaaagaaaatgtggatgaaacttttttaacaagagtcttgttctcttcctcaggctggagcacaatggcgcaatcacagctcagtgaagcctcctgcctcagcttcccgagtagctgtgccaccacacccaccacatctgtgtgttttttgtagagatagaggcttgctatgctgcccaggctggcctccggctcctgggctcaactgagcctcctgcctcggtctccccaggctggaactgcaggcgtggctcgtctaactttaccgaaggctcgcatcccagtgctgcaaacctagactcgtaccctgacaatccccaagggaggtttcagaggcacaggcagcaagtccctcaacccctcaggctcacttctggcttgtgggggaaaagaccaaaatcagccatctagagccaaatacagtctctaacttattatggctcaatgcaggattttttcactttagcatggggttaccagcaggcaacctcacagaaagtcaaggagattttgtatttaagaaatgaaagctgagaatagtggctcacgcctctaatccaagtactctggaaggccaacatgtgaggatcacttgaggccaggagttcgagacaaacctggataacacagcaagacccatatctaaaaaaataataataataaattaagtatttcaatactaataggacaactggccaaaatttattgaaggctttaaaacactgtctcgggctcagtgtgtgcatgtcctaatttatttaattatcagaaattctgcgaggtgggcatgcacagagaaacctaagccctggccacatggcaagtaggcagatggcagtggtggggtccccctcgaccccggccctgcctctgaacaagcagcattttcctcccaagtcacactgtccttccttttttatttttttgagacagagtctcactctgtcacccaggctggagtgccgtagcg

SEQ ID NO: 45467 - DNA, 1375 bp, Homo sapien
cgtgaccaggaaaaggctcaggctcagaaaagacccgtgaagaccctgagtttccacaacaggccgaccccacagacacagcccagcacaaccaaaacaacaagtgcacacccttgagtggggaccaggaagaatcacatcatgagaatcaaatgtccatttttttgactaagaaaaacacaagagaaacaaagaaacaggacagtatgtcccattcagaggggaaaaaaagaagccaacagacacggttcctgaaaatcacctgacggtagatgtcccagacaaagattttagggaactgtcttaaaccttcagttcctcagagaacgaaaggaagatgtggagaaagtcaagaaaatgacgcgtgaacacgacggaaatatcaacagagacagaagatccaacaagaaaccagagagaaattccagagctaataagtacatgctcacaatagacactaaaaagtaaatattcacaacagaaactcacaggcagatgtgagcaggcagaagaaataatcggtgagcctgaagacaataaaatcacatcgtctgaggaaaagaaagcagaagagactgaagaaaagggagcagtgctgagcggcctcggggaccccaacagatctgtgggagcccaggagggaggagaggagcagagagggtatctgaagaattcctcaaaacccccacattggatgaaaaccgtaaatataaacattagagaggctcagtgaactccaggtagaatgaagtcaagaggcccacaggaaaacccattattaaacagttgaaagcctaaggcaaagagaatcttcaaagcatccaagggatcctcaattaggtcatcagattaaagcatccaagggatcctctataagatcatcagatttctcatcagaaactttggaggccagaagacaatgggctgaaatagtccaagtgaaaaggaaaaactgtcagctaggcatgagggttccttgagcccaggaattcaagaccagcctgggcaatacagggacaccttgtttctactgaaaaatgagccaggtgtggtggcacacgctacgcctgtaggtcccagctacgcgggaggctgaggtgggaagatcacttgtgcccaggagttcgaggttgcagtgagctatgatcgctccactgcactccagcctgggcaacagaagaagactctgtctcaaaacaacaacaacaaaattgtcaaccaagaaccacgtatccagcaaactttccttcaaagatgagggagaaatgaggatattctcagataaacaaaagcagagggagttcattactactagacctagacctgccttgaagaataagctccagggagttgtgtggggtgtaaggaaaggacg

SEQ ID NO: 45468 - DNA, 1280 bp, Homo sapien
cgtttagcataccattttaatttatttgtactttttagaacactaagaaaacaactttcttagtggttgctctagggatcaccatatgcctcatgatactagctcaagtccagtacaatataaaactgttgtaacacagcttcattccctgtcttctttgtgcagtccatttatgccacataccacgacaacagtgtaattattttacacaatcgtagttccagtaaaacctaagatgtgaggagagatatttacaggatattgacgtcaacctacacttgctatctgcagtgcctgtccttccttcctgaggattcaagttaccgtctggtgtcatttctattcaacttgaaggtcttcctttagtatttcctttaaggcaggtttcgccaacaatgaatcccaccagtctctgcttctcagggaatgtcgttcgttccctttcacttgtgtagaacagttttgattcctggctgatggttcttctctctaagcagcttgagtatgccactccactgccttctggcctccattgtttctaagaagtcagtggctggcggtattgaagctcccctttcatgggatgggtcattcttctctgagccctttcaacattttctctttggcctttgccagtttgactatgatgtgactttgcatttattctagttcaaacttcctgtgctcttgaatgtgcatattttttaattaaaatttggaaagtttttaaccattattgtaacaaatatctttcctctctcctggaacccccattcgacgtgctttggtacagcagatgttgtaccacgggtttctgaggctctgtgcatttttcttgtttttttctctctgttcttcagaatggataatttctactgctccatccacaagttgtttccaagcctttactaaattcaacatctggacactcaagacagtttctactgatgatgttcttcctcagtacgggtcacactgtcatacttctttgtattttagataatacatttgtagcaattctggattctaagttttccctttcgttgttaccaccaaggcctgtctggttgtccgtgaaatccatctccctcatagctcatggccaccccgttccttcccacatgcctattttaattttcaaccttggcttcctaggggtcaccaccatggctgcacagcttagcaattagccagcactggaaaaaggctgggctcaaatacctcgagcacagtaaggcttccttggcccacggctgtgtgtggacagggagcacactgaa

SEQ ID NO: 45469 - DNA, 2029 bp, Homo sapien
ggtggatcacctgaggtcaggagttcaaaaccagcctggccaacatggtgaaaccccgtctctactaaaaatacaaaaattagctgggcgtggtggcaggcacctgtaatcccaggtactaagggaggctgaggctgtagaatcacttgaacctgggaggtggaggttgcggtgagccgagatcgtgccactgcactccagcctgggcgaaaaagtgagactccatctcaaaaaaaaaaaaaaaaaaaaaaaaaaaaaaaaaaaaaatcacatgaaaatgaaattaaatcaagaacattaaatatttaaataatgatgttaagtaatcctaatctttttttttttttttttgaagagacagggtctcactatattggccaagctggtcttgaactcctgggctcaagtgatcctccatccttgtcctcccaaagtgctgggattacaggcctgggccactgcacccagtcgaataatcatgattttatgttaaataaaaaactttgaaaatagaaaactatctgcagtaagcgtctaattatgaagaaagaagaaaaaagaaaaacaattctgctatcacagaagagaattgtaatattcatcttttaaaaattttctatactgaataaactataattatcagttttataatacaaaaaccactcttcacaaagactacagaacaaagctttgctatcagtgggcttctccactgtgcaatgaagccacattaattaatcaagcgtatttataataatgagatttcaatcgggctccaggtccaattttcctaacacccgtaagaatctcctgatgttggtacgagatcaaactgctcaagcctaacccattctttggacttgagcaaatacccattttggggtgtgtttttctcctatacttgttgaattcaggtcattttaaatgtaaacaaactgctcccaaacaatataatgggggagagaaaaccccagaggaaaaatggactagccattctgaatggtctgtgacacacgcacgctttcagctagagtttgctctctctggttttcggtctgtgacacacgcatgctttcagctagagtttgctctctctggttttcggtctgtgacacacgcacactttcagctggagtatcctctctatagcccctctgaacggtctgtgacacacgcatgctttcagctagagtttgctctctctggttttcggtctgtgacacacgcacgctttcagctagagtatcctctctatagcccctctgaacggtctgtgacacacgcatgctttcagctagagtttgctctctctggttttcagtctgtgacacatgcatgctttcagctagagtattctctctatagcccttctgaatggtctgtgacacacgcatgctttcagctggagtttgctctgtctggttttcggtctgtgacacacgcatgcttttagctagtttgctctctatagcccttctgaatggtctgtgacacacgcacgctttcagctagagtttgctctttctggttttcggtctgtgacacacgcatgctttcagctagagtttgctctctctggttttcggtctgtgacacacgcatgctttcagctagggtattctctctatagcccttctgaatggtctgtgacacacgcatgctttcaggtggagtttgctctctctggttttcggtctgtgacacacgcatgctttcagctagagtattctctctatagcccctctgaacggtctgtgacacacgcatgctttcagctggagtttgctctctctggttttcggtctgtgacacacgcaggcttttagctagagtttgctctccatagcccttctgaatggtctgtgacacacgcacgctttcagctagagtttgctctctctggttttcggtctgtgatacacgcacgctttcagctagagtttgctctctctggttttcggtctgtgacacacgcacgctttcagctagagtattctctctatagccattctgaacggtctgtgacgca

SEQ ID NO: 45470 - DNA, 1803 bp, Homo sapien
ccactgcactccagcctgggtgagcaagactcttgagacaccgtctcaaaaaaaaaaagagtacacttcagtatttacaacagcacactgagcacactgtcacagtaaccctaggaaagagtaaaccttaatagttacaatagcacaccccgtcacgtaaccctagggaagagtaaacctcaatagttaaaacagcacaccccgtcacagtagccctaggaaagagtaaacctcaatagttacaacagcacaccctgtcacggtaaccttaggaaagagtaatctcagtagtacaacagctacaacacgccctgtcacggtaactctaggaaagagtaaaccttaatagttacaatagcacacagttgtcacagtgaccctaggaaggactggccaggccagggctgtgtacagttgggtcttgcacatctgtacatccgctcacctgtcttccattgagtcttctcttctatacggggagttccttattgtgatctccatgcagtgatctctcagctccccctcctcaagggaatcccgcttggaatcccggtcatcagactaagaagcaaagagaaagttaatcattttctttataagtttttttttcttcatagataaaagtatttttaatgataatcaaacctgggcaacatcccaaaacaaactttcacatgtactctgaatgagccagtgttataaaatataaagaatttttggccaggtgcagtggctcacgcttgttaatcccagcactttgggaggccgaggcgggtggatcacgaggtcaggacattaagaccatcctggctaacacggagagaccccatctctactaaaaatacaaaaaattagcttggcatgttggtgagcccctgtagtcccagctactcaggaagctgaggtaggagaatggtgtgaacctggccctgggcgacagtgcgagattccgtctcaaaaacaaaaaaaaagctaacaaagtgagcacatgctattggaaaaatactcaaagcagagttgctacaaacctttaatttggaaaaatttcaatatctgtgaagcataataaagtgaagtgcaaggtatgcctgtactcactaacatcccaaatgatgctacaaatcttagcaaaagaggtactttgccaatgcctcttaccaaattactaaaaaggtttcctgagtacattaccatgcaaaccaagaaagacgtaaaatatttatattaatttcaaggcaagttcccactatattaaaaatacttagagatagtattatgaatatactaataatgaaccgagaaaaattagtccagttttgctaatgacttaacattcaacgtattttattctccatgtatgctcaatctagacacagctttagtgtgttaaatctgcctttaatgtcaactgaatattagaatacattttgggctcacctgcgacatttggaagtacaaaagaacttcaccgaagaagcgttgttctaatggaaaaatgagggcaaagaaattaaatctcctttaagaaaaccacttacttaaaaaaatatggcttacattttttaagcgttttatctctgctttctcctcttgttccttccttcgtttcttttcctgaagaatttcatctaaagttttcactttccaagagtccttttcatcacccatttgagttaaaacactgcaaaaagaaaaataattcagcctacatcaggacacagcaagctatggtgctgaacacttgaacctagtcacttttgagggattcagaataaatcctcattaagaataagaagttgtgcc

SEQ ID NO: 45471 - DNA, 1039 bp, Homo sapien
ggaggaggaggctgcagtgagctgagatctcaccactcactgcactccagtttgggtgacagagcgagactctgtctcaaaaaaaaaaaaaaaaacaagaacatctcccacacactcacagtgcctttgtagccccagggaaagcaatcccttaagatcatttgttgggtgaaaagggtaccaagtacacagtgttaggaccgtgcaaaaaaagggtgacaggaagtaccctttgcaaactttccataatgtgtacttaattcactgctcttataaaatgaaattaaataaaacaaaaaaatactactgaaaaataattgggcaacatgcggtggctcacgcctgtaatcccagcactttgggaggccaaggcagacggatcacctgaggtcgggagttcgagaccagcctggccaagatgatgaaaccctgtctccactaaaaatacaaaaattagctgggcatggtggcaggcacctgtaatcccagcttctcgggagactgaggcaggaaaatgtcttgaacctgggaggtggggttgcagtgagccgagatcgcgccactgcactccagcctgggcaacagcgtgagactctggctccaaaaaaaaaaaaaaaaaaaggaaaaataattgggctgagtgtggtggctcataattgcagtcctagcgctttgggaggccaaggtgggtggatcacttgaggccaggagttcaagatcagcctggacaacacagcaaaatcccatctctcaaaaaaagtaaaataaaataaaataacaaaaaacaaaaattagcccagcgtggtggtggacacctgtagtcccagctactcaggaggctgaggcgagaggatcacttgagcagggaggcggaggttgcagtgagctgagatggcaccaccacactccagcctgggtcacagagcaagactctgtctcaaaaaaaaaaaaaaagttttttttttttgaaccactgctaacaatcactaatgttcactaaaacactaggcttcaggagcatttggaaataattcctgac

SEQ ID NO: 45472 - DNA, 2080 bp, Homo sapien
gagatcgcaccactgcaccccagcctgggtgacagagagagactctgtctcaaaataataataataataacaacaatataatttacagctgggtgtggtggctcacgcctgtaatcccaacactgggaggccgaggtgggtggggatcacctgaggtcaggagtttgtgactagcctgaccaacatggtgaaaccctgtctctactaaatataaaaaattaggcaggcatggtagcacatgcctgtaatcccagctatttgggaggctgaggcaggagaatcacttgaacctgagaggtggaggttgcagtaagccgagattgcactgcagccttggtaacaagagtgagatttcatcttataaaaaaaaaaaaaatatatatatatatatatatacacacacacacacatatattattaaaaatatatatcttattaaaatatatatacatatatatgatctataatagcattaaaaatataaaatatgtggggatatatttggcaaaagacatgtcagaactgcacactgaaaactacaaaatattgctgacagagatgaaaggaaacctaaataaatggagagacataccatgttcatggattggaggactcaatattgagatcttagttctcatcaaattgatctgcaaatgttacccaaacacaaccatcaaaagccaagcaggcttctctaaaggaaaggacaagctgataaaattcacatgaaaatgtaaagtatctagaccagctgaaaaaactttgaacaagaacaaacgcgaagggctaagttcatgacttgttgaaaaactacgggaaccagacagcgtggcagcatcaagacggacatacacatcaaggaaacaggacggccagcccaaaggtagacgccacagaccctcacacacatgcagtccatgaatttttgacaggtgctgaggtgattcaacatgaggaggatcatcttttcacctaatagttctgaacaactggacagccacgtctaaaagaacgaagcccaaccacttcctcatactacatacaaatattaactcagaatggattatagacctaaatgtgaggactaaaactatgaaactttttagaagaaagcactggaaatttttttttttttgtctttttgtgagacaggatctcccactgttgcccaggctggagtacagtggtgtgatctcagctcactgcagcctcaaccttccaggctcaagcaatcctcccacttcagcctcccaagtagctgggattacaggcatgcaccaccacacctggaaatttttttttttttttggtggagatggggtctccctatgttgcacaggctggtttcaaactcctggtctcaagtgatcctcccaccttggccttccaaagtgttgggattacaggcgtgagccacctcacccagctggaaaaagtcttagtggtgtttaaaatcttttatacttaatggaaccctgaattttttttttttttcctgttttaggcagggtcttactctgtccccaggctggagtacagtgatgtaatcatggttcactgtagcctctacctactgtgctcagacaatcttcccacctcagcctcctgagtaccagggactacaagcatgcaccaccatgcctgactaatttttgtatttttttgtagagatgaggttttgccatgttgcccaggctgacctcgaactcctgggctcaagcaatctctctgcctcagcatcataatgtgcttggattacaggcatgagccactgtgcctagccaaaacactgttaagaaaattaaaatacagttgggtgtggtggcttgtgcctgtaatcccagcactttgggaggccgaggcgggaggatcgcttgagtccaggagttcaagaccagttctgtgtcttgctagtggttatataattaatttaagaggtaacactgcatagagccatacacacatgtaaaactggtgaaacctgaataaggtctatagtttagttagcagtatttcaattccctggttttgatattgtactatggaggtgtatggaggtgtaagatgttaacacaagggc

SEQ ID NO: 45473 - DNA, 1132 bp, Homo sapien
cgcctcaaagaaaaaaaaaaaatcctctgtattaggaagttttattagaaaaaaatactagagcacaataagaaaatattcataacgaacttatacaaagtagcaaggaaaacattaagatgccaataaataaatgtgcaaagaacatgaacaaaagtcacacacacacaaatacaaacataatacacgagttcgttcccatgtaagaactcaatcaatatttgttgcaagactaaatgaaaaaggaaaatttatttagtgacagaaatggggaaacattcaacctcaaccctgagtgggaaaaaacttactgcccactaaattacccatctcatctcaccccggtaaataatgcccagtgctggcatgcacactggcagtatacaaactgagaaagactttctggaaagtgctacagccatgtgaccacagggcttcaccctgtgacctcattaaacctaagcagattacaggtctgaagggggctttctttagatgtggctccacctacttaggggcagatgaagaaaacaggggtctgggcagttctgaatgggaaggccaggcatcacctccctcttcagttgcacaaagtgtgcgtggcatcctcacatcccatctgcctcaatttcgctttttctctgaacacttttcaccatctgtctgaagcacacacacacattttattcacttccccattcccatgcatgaatgctaggacctttgcaattgtgggccaggaaagattgcaaatgataagccaccagcacagagagtagaaatgaaatcctggggttacaagctaaagcattactgacacccacttgtccagaacggctgaagctgggcggtgactgtcaacaggtatatacggactagaaagtggagctgctggaggaggccctgtaccttcctgccatgacacagcctccccccaagtgctgggcttgtgtgctcaacactccctcttgctgtcatcctaccacacctgcagactggaggtaatccagatgcaaggccgtcgagtcccgcaaacacccacctgcctcttaattttccaagtgagacctacatttcctcaagcgtgaagctcaataaaatcaactattgttttccgttttcatcacgagcg

SEQ ID NO: 45474 - DNA, 1035 bp, Homo sapien
cgggaggtggaggttgcagtgagccgagattgtgccactgcactccagcctgggcaacagagctagactctgtcttaaaaaaaaaaaaaaaaaaaaaagactggtcaaagtggcttacgtctgtaagatcagcactttgggaagtggaggcaggaggatctcttgaggccaggaggttgagactagcctggacaacacagtgagactctatctctacaaaaaattttataaatcagctaggtgtggtggtgcaggcctgtaatcccagctactcaggaggctgaggtgggaggatcaattgagcccaggaatttgaggttacagtgagctataatcatgccaccataaacacgcctggaggacagagtgaggccctgtttctaacatacacacacatatacacacagaaacatctcgagaggacacctccaaatgatgaagctattttgttgggtactgcggtggcacctgtgattcctcaagtagcttggaatcagcgtgctaacaccataaagtggctgcaaaagtcccagtgaagtcactgctgagagcaaacaggccttacagagaagttccaaggggacaggaaatttccagaggcttgagaggacaatgttcaggggaataagtacttgaagggaattatctaacaaggtgttaaagtaactagcttcttagacaagatgacatcaggaggaaaaaaaaacttattaaggcaaacatgtcagtttcaggccaactaaggctgtcagagagacatggaacacaagaagagaagagttttgaaatgtattcccatcaagagccaagaataatgaacttttgaatgtaaaacttagtgtgttccaaaacaagaaaggaaaaataacttgttactcggaatcgaagccaaaaggaatctcattgcttggggaggagggatgggagggtgggggtggtccttggcctgggaaggaaaactccaccaggccttcggagctgggcacgccctgttcccacaattaagaaaaaaaacgacgacctagagctcaaggc

SEQ ID NO: 45475 - DNA, 1064 bp, Homo sapien
cacccacaagccaggcactgagccaggcctcagtagaatcttctagagtggaggcagtcaactgcttctgcagaggcaaccagtgactgtcgtgggccccaggtcacacagcaggtgcccttcgcgtgtcccgctgtgtagggagctccagcagctgccccgtctgtggcatgaaaaccctttgtctaccctgggcctgggcactgcctgcaggagagcttccctgtttcagagatgagaaaacaaaaccagggctgtggtttccttcagctgacaggttgtgcaatttctcagggcaggccccggatatgaccttgaagattcaggggccaagatctcacacccacacctcaccccaggcctggccagcaataactaagaccaaagctgggaaggctccttagggcacccagaatggtccaagaggcagctttgcttgggctgagaccaaagggaagagatgttcccgcagcaggaacagaagggtccagggctatcatgggggcttctgccagatggtgcacaggaagaggctctgccttcaagggattgggggtcaggaaaggccccctcctgcctgaccaggccccagggatggggcagcagtgggtggcatcccctgccctgaccttcctcagccccagggctgccattgctcaaggtggcagtggactcttcacataatttcgcattgttttttgtattctttaaggatggctcccatgttgtttacttcagaacccccaaaacctggacccatcctcttctgggggtcagcagggatggggagggtggagggagaagggggaacggaggccatgagggatggagcaggatggggtgcactggggtacaggttgctcctggggaggctgaggagagagggaagttggcttcaggtggcctggctccagtaaactgggtgaacgaagtctgcccagaacccacaagggtaagtggcctggagcctggggaaaggatgactgggaaggactgaggctcccagtgaaggacatcagtatggcaggctatctggtcatctcatccagcctccagccagcacc

SEQ ID NO: 45476 - DNA, 2004 bp, Homo sapien
ctcatgactgtaatcccagcacttggggaggctgaggtcaggagtttgagaccagcctggccaacatggtgaaaccccgtctctactaaaaatataaaaattagccagctgtggtggtgggtgctgggtctgtaatcccagctactcgagaggctgaggcaggagaatcgcttgaacccaggaggcagaggttgcagtgagccgagttcacagcggtgcactccagcctgggcaacagagtgagactctgcctcaaaaaaacaaaaaacatgacctcataggtctcaaagatgacctctctgtcccaccctgtgcaggctgtagtgaagctacacagaatccatcagcttcttactccaagaaccagagactgaaccctaaaatcacagctctcaagcgctgataaaatgatgtggacaagcatcagctgacaggaactatgaaggacaaggggaatgaccgaatgtataagccacacatggcccctgacttacaattttgtgactttatgatggtttgaaagacacacgcatttaataggaaaaccatgctccaagtacccatacaactattctgtgttttcattttcaggagtgtccaataatttacatgagatgttcaactttttcttataagatatgtattatgttagatggttctgcccaaccagaggccactctaagtgtctgtgcatgttcaggttggggggtgaggtgtgtccagtgcggctggagagcaggatgggtggtgcaatgcccagggtgcaagcatactccatgaggcccagtctgtgaacagagaccaggtctaaccccttcttccaggaaagcctcgtagggccttctggccaagaggccacgagtggtgaagactgcagactctgaaatcagaaatacctgggctccactgtcagcatggcagctgaggaagagtgaaaattcctctaagttcttttagaagtcccagcctccccatgtaactggggaactgatgggaggagcagagctgtctgtgcacataagaagttctcagtaaatggagacagttactatttctgttattattgaatttgaacaaattccctgggtatgtgtggggggacacttcaggtgaaaacacgcccctcctcccctggtgcgggggcctgtgctgccaccctctggaagcctgcagaggggcagggaaaacagaccctgaacaaaagtgtgcacccagtgaggaggtgcaagggcacaaaggtggcaccaagtgcctcaaggagaggctgaaacgcggcctggggacctcgcagtggtctggtcatataggcagtgggtgtgaagggctgtcctgtgtctcatagggaccactggctatagggacaaggctgttaaagtccaggagagagggggtggcttgaagagaggcacggcagagagtggaagcgtaggagaaagatgggctcctgggcatgtggtgtcagcagaggtgcctcaaggatagagtgagtccagagtctagaaaggagcagatcaccaggctctgggaagagcacagcatgggtgcacacactgctctacccagcatggctgccgacccaaagacagcaaagccaagaaggacacacaagcgtggccagatgcagccctgtgaggaaacttacccaagaacgggacgatgggcttgagaaaccatccatctacaaggatggcgtttgctgcagcaatgtttataataaattgtgggaaactgtgaactgcctaaatgtctcacaataggaacaaattagtgcaccacaccatgaaactctctacagctcctgagttacagaacgacagtataatactatagttatataatactgtataatactactgcataactattgtataatactgtatttctggatggaattatagggtctcccaacataaaagatgatgattcaaagttcctttccaaaattcctttttttttttgagatggagtctcgctctgccacccaggctggagtgcagtggtgcg

SEQ ID NO: 45477 - DNA, 1712 bp, Homo sapien
cccagcccacaaacactcttaagaggccaaatgtgtgtgtgtgttttttttaaataacacaactccttagaagtaaaatttcatgaaatatgaaggaaataaaatttctaaaatattcctactaataccagtttttttattttcttgagtatttttggcttttctttctttggtttcaaagacaaatacagtcagtgttaaatccagcaacctttgattaccaatggaaacagatgcacagactctgacggtcatgggaagggactgctgaacatagagaacacctttccaaaaagggtgctgcgtcagacagagctgtgtggtttacagggtcagtgtgagctgcctggctggactcccagcgatggccaggggctcctatctgtaggcattaccttctcacagaaacaactataagcactgcacaaactacaaaacgaaacacctgaaagcatgaaaacaggagcaggtagaaactggaggagtctcccctgggagaaaagaaaggcaggacatggtttgttcttaaggagctttctctgaggaggggactgtctgtgacaaccccagggctacagcctcacacacaagacctgtggccaaggtcttcaagagccagtagacagattactgggcaaccacagccagaaagcgaaaggataacaactacaaagaagaaagccacagaaagggagtcccaaactacacacacggctgaccagatatccgacacctgaagtgcacaggcatgcagcccagccagcgcagaaaagctgaacagaggtttctgctgctgccacacaagaaagacagagatagactgcctgatacaatgacactaaacatcagttagttctggagaatgtaaccggacacaaagtctctatgacacaacatttacaatgtccagaatacaatttgaaattactacatgtactaaaaaaatagcaaaatgtcactcagaatccagaggagagatccacaaggaccaacctcaggaagatgagatgctgggatcagcagacaagaactctaaaggcagctattaaactctccttgtggatgcaaaataaaacatgctattatacaaggacagggaatctcagcaggaaaataaaaaatttctaaataaaagcaatagaaactctacaactgcagaaggaatatctgacataaagaacctgctggatagccttagtttatcagaggtaacaagtacatgaacttgaatggaaataaaaaggttaaaagcaagtaagtggtgctaacaacaacaaaaaggaacaaatctgaagaagtgggaaagtgatgaacaaaccccagccccctgagcctcggggacagcacagatgcgtgtgtattgcagcacagaggggcagggactaaggacagaagatgcatttgaagacatggtctaaaacttcccaaatttggtgaaagacaaatttatagattcaagatgccaaagtgcaataaatgcaaagaaaatcacaccgaggcacctacgtgcaaactgctaaaaaccaaatctttagattgttaaaaaaaaaaaaaaaaaagaaaaataaattaaaaaaagagtcaacccataattctagatatccagcaaaaatacccttcaagaataaaggcaaaatataaatcttagagaaatgaacactaagtgctttgctagcagcagacctgagaactgcattaaccatgacttgttc

SEQ ID NO: 45478 - DNA, 2160 bp, Homo sapien
cgagacattgggaatgtacactataatccctaaagacaccactaagacatcaggcaaaatggtttacctacaaagcccacagacaaagtaaaatagatttctttaaaaaatcaagtaacccaggccaggcgtggtggctcatgcctgtaatcaagtaactcaaaggaaggtaggaagggaacaaccaaaaaacaaaaatgaagggacaaaaaggtggcaaagtagcagagttacaataagaaatataaatgtgcaaaagcatattccaaaggcgggcagaaaaaaccaagacccaacaatgatgcgaggtctgtaacagactattttcaaagacacagttaagctgaaaggacccccatgaaggcaggactgactacattagtatcagaaaaagcagcggttcccaacaaagagcattatgagtgagaaagaacagttcatcatgagagcagggtcacagggtcaattaatcacaaagagacaacaaatgtaaaggcatctactaaaagagctcaagatatctgaagcacagattgacagaattaacaggaaagttagaaaatccataatcattttaacagccctgcatgagcatttcatagaaagacacagaatatttgaacatgccaaaaatcttgctctaattaacatgtatgtagaaaatcaggccgagatacaacaaaaacacatatcattcccatgtgcacacagcgcggccaccatgacagaccatcagctccattaaaaacaagcctcaaatgtcaaaggactgaaatgataccaagtgtgtctttaagcacaatgacatctaattagaaatcaacaataactaagaaaacttcagatatgtaaaaattatacatctaaataacctataagtcaaataagcactcacaaggatattaaaaatttcacattgaatgataattaaaatacaatataggctgggagtggtggctcaagcctgtaattccagcactttgggaggccgaggcaggcagatcacttgcagtcaggagttcaagaccagcctgaccaacatggcaaaaccccgtctctactaaaaatacaaaaattggccaggcgtggtggtgcacgcctgtaatctactcgggaggctgaggcaggagaatcgcttgaacccagggggttgaggtttcagtgagctgagattgcaccactgtactacagcctgggtgacagagcaggactccatcttaaaaaaaaaaaaaaaagacaatatgaaacaaatgtgtgtgatgtggctaaagccatgcttagagggaaacttaaaactttaagtgattctatttgaaaaggaagcaaaccagtggcctacagatctacttcaggtagctggaaaattaagaaggcaactccaaagtaagcagaaggcagaaaagaacagagaacagaaatcaacaacagcagcagcattatctttcaaaggacaaggttaaacttgtaatctggccaaaattaacttatttaacagactgcttaatgggtgtcaactgtagtactagtgactccatgaactgatttctttggctgcatgtgaagtgggcggagtgttatcaaaaagtactggggcataaaatgtctgagaacaaataatacagccagagaggtaaaatattagaatagtacatcctctttcagcaaatgtatgcctttcatgatgaattagtgtcacaagtaaataaaatcttggtgaaataatagactacctagcacttacggccacagggctctattatgcctcatttgcagagacagggtctcgctttcgcccagcctggagtgcagtggtgcaatcatagctccctgcagcctcaaccacccaggcttgagccatcctcctgaggagctgggaccatagttgtgtgccactgtgcgtggctgtttttcattttttgtagagaaggggtctagctttgttgccccagctggtctcgaacccctggctccaagctatcctcctaccttggcctcccagagtgttgcagttacaggcatgagccaccatgtccagcgcaaatccacaggtttcttactggtaaaggcatatcaggcttgtttttagtttcattttcagaaaacttctggccattactgtgacttttatttgaaccagtctcatttaatgattcataaggc

SEQ ID NO: 45479 - DNA, 1013 bp, Homo sapien
cggcccacaaaaaatattttttaaaaattagctgggcacagtgatgtgcacctgtggtaccagctactcaggaggctgaggcaggaggattgcttgagcacagcagttcaaggcttcagtaagctaggatcgcaccactgcattctagcctggacgacagagtgagacccagtctcaaaaaaaaaaaaaaaaaaaaaaagttgccttttagtacaaatatattgataaacatattacaaatgtacatctgatacattaatacatacatacataacaagtaatcattgtgggccttgcatgtagttttcttttttgtttgtttttttgagacagagtctcactctgtcacccaggttggagtgcagtggtgcaatcttggctcactgcaacctctgcctcctgggttcaagcgattatcctgcctcagcctcctgagtagctgggattacaggcacccaccatgaagcctagttaacttttgtatttttggcagagacagggtttcaccatattgggcaggctggtctcaaactcctgacctcaggtgatccacccgccttagcctcccaaagtgctgggattataggcgtgaaccacggtgcctggcctctcatgtagctttatttgtgttttgttttgttttttgaggcagagtctccatccgtcacccaggcgggagtgcaatgcgcatgtttgtgggtatatatatacatatatatatattttttttttttttctttttttgagatggagtctcactctgttgcccaggctggagtgcagtggtgtgatcttggctcactgcaacctccagctcctgggttcaagcgattctcccacctcagcctcttgagtgcagctgaaactacaggcactcgccaccacacctggctaatttttgtatttttagtagagatggggtttcaccatgtcagccaggctggtctcgaactcctgaagtcaagcgatccacctgacttggcctcccaaagtgctggggttacaggtgtgag

SEQ ID NO: 45480 - DNA, 1787 bp, Homo sapien
ggtgcctgtagtcccagctactcgggaggctgaggcaggagaatggtgttaacctgggaggcagagcttgcagtgagctaagacagcaccattgcactctagcctgggcgacagtgagactccgtctcaaaaaaacagaaagacaaattagtagtcatttctactgtttccgagtgtccataaatcaaacaaacacagttaaaggaatggtattcataggccagacgcagtggctcacgcctgtaatcccagcactttgggaggccgaggtgggcagatcatgaggtcaggagatcgagaccatcctggctaacatggtgaaaccctgtctctactaaaaatacaaaaaaattagccaggcgtggtggcaggcgcctatagtcccagctactcgggaggctgaggcaggagaatggcgtgaacctgggaggcagagcttgcagtgagccgagatcgcaccactgcagtccaggctgggtgacagagcgagactccgtctcaaaaaaaaaaacccaaaaaaactggtattcataaattatagctttaagtcatgaaaaacaagcaataacatttgtttatgaaggcaggaaatatgaagattaaagaaaatatataccctccccactctgtcatgtggtggggggcaggaggagggacagcattaggagaaatacctatgtaaatgacaagttaacaggtgcagcaaaccaacatggcacatgtattcctatgtaacaaatctgcacattgtgcacatgtaccctagaacttaaagaaaaaaaaaaaagcttgtggaacaaggagatatagatatacatgtatatatatacacacacatacatacacacacacacacacacacaccctccccccaaaaaacctcttttggaccttaaagaggcaaacactggcctatccagaaaaaaacggctatttacaacaagcaatctctagaaggctctgaaaagcagaggttctccataatatcattttggttttctcatgactgtgcaattatacaacaaatgccatgcacctagcaccctgtccaagaacatggaccaatgtggcaccccagcctcccacaggcctcactgaagactgccttgctcacagggtggccatgattctgcacttggtcctgttttgtcagcccttgcttttcttccttctaatcctggggctttcaaggcacaaagtgtgtttgagacagacggaacataaagcctcccatgcaaggatctggcgcccaccccacccaccctgagcccccagccccacctccactgctcagttcacacacccatctcttcggtccctgaacacacctgcctgcaggtcactctcatcccttccagactacccagtccagagcccagctggtgaaggagacatattacttggcagtgcagtgctctgagtacctgaacactgcccagcagcagcactgtctactccactaacctgcctaatctgcacatcagtgttcccacacatggaggaaaggccccagaggtaacatactgttttgttttccatctacttttgacaataaattctaacatagatagactagtaacaacattttttcttttttttttttgagtcagtgtcactctgtcacccagtggtgcaatttcggctcacagtaacctccacgtgcctcagccttccaagtagctgggactacagctaccatgcccagctaatttttaaatttttagcagagatggggtttcgccatgttggccaggaggctggtttcgaactcctgacctcaagtgatc

SEQ ID NO: 45481 - DNA, 1590 bp, Homo sapien
ccactgcatccagccagaacattttttaaaaaattctttttaattttttaaaggaataactttgaattcacaaagtatattcttacttatttacttatttatttagagacagggtctcactctgccgtgcaggctgaaacacagtggggtgatctggaatcactgcaagctctgcttccctgactcctgggttcaagtgatcctcccacctcggcctcctaagtagctgggactccaggtgcgcaccacaacaaccaacttatttttgtactttttgtagagaaggggtctcgccatgtgacctaggctgatcttgaactcctgggctcaagccattcgcctgccttggcctcccaaagtgctgggatgagaggcatgagccaatgtgcctggttacttatttattttgaatatttaaaagaatttttgacaagtaattatatgtatatttacggagtacaatgtgatattctgatatatatccacattgtgaaataaatcaatcaagctaatcaacatacccatcacttccaatttgctctgtggtgggaacacttaagtctactttactaacaattttgaaacacacgttattatgaactactctccgtgctgtgtggcacatttctaaaatttattcctaactaaaactctgtaccctcagaatatcatctccccacttccccaccctcccccttcccacttttattctttctgactcctgctgtcattggaaccatcatgcgagctctcatttgcatggggaattgtatgggatactatatagaacaaactaaagatagaatcttttgttctctagctgtttgtgctctaaagcggacaatttcacgaacaaagaaaaagcctagcagaaaattccacgctaacaacggaatacaaagaaatactactcaaagaagggcatgttaaaaattgttatgtcaggtgcttcaacgagcatgtcacagttacacaaatcaaacagtactttattaaattatttagatagaacaggcaccaaataagactttgtaatagcctctaaatcagagtgtggggtcacggaagggagatgcctggtggagaagaaaggggtataatttaaagtacaagaaataggctagaagtggtggtggctcacacctataatctcagcactttgggaggctgaggtggaaggatcacttaggggccaggagtttgagaccagtgtcagcaacaaagggagaccctgtctctgtaaaaaaccaaaaaatattagccaggcatggtggcacatgcctgtggcctatgccacttgggaggctgagtaggaagggttactggagcctaggacgtcgaggctgcagtgagatatgatcacaccactgcactccagcatgactgagtgagaccctgtctcaaaaaaaaaaaaaaaaaaaaaaagaaaaaaagaggctgggcgtagtggctcacgcctgtaatcccatcactttgggaggccgaggcgggtggatcgtgaagtcaggagatccagaccatcctggctaacatggtgaaaccccatctctactaaaaatacaaaaaaattagccagtgtggtggcaggcg

SEQ ID NO: 45482 - DNA, 1429 bp, Homo sapien
catttggattcttcccactgggtcgatgttgtttgtgatcttgaaaataaaaacatttctgtaaatcaacatctgtgattaaacgattctcctcatcacccatccttgtcaaggctgttggctcgcccactgtgcctacctcttcccagcccttcccacagttctccagtggcttccactgtggcattctgcactgaaccccttccgtacctcttaccaagtctcagtctggctggtcatcaggaacctgtgtgccctgccctccaatgcacgcacacgaacatggccagccttgaagcacttgctgttcccttcctgcttccttcctcctctccctgtccatccaggaccatctcctcctaggtctctgagttctttgagatctcgcaactcttcttatgacaccacacagatgtcccacaccacaatttaatagctggttcctatgtcaggctatgtgtgggcctgcatgacacctgcttctgcacgaccatcacttggagcaccagctgtacacacacctgctgagcccatcctacatatagacactgatgttaatgagtttaggttggcaaacggagtaagtggattacaatagtgggttttaaaaacggacagtccaaagtgcttctcagaattgaaattcaggtaattctatgtagcctaatttttttttctttaacttacaatttaacctcaattaaagcacatcccctaaagcatttagacaatgtaaaaaacttaatcatcttcagtagaagtaggaatatagtttttctttcacatttctgtccaattatttggactttatttttattatcttttttttttttttttttttttaagatggagtctcgctctgtctcccaggctggagtgcagtggtgcgatctctgctcactgcaacctctgcctcccgggtccaagcaattctcctgcctcagccccctgagtagctgggattacaggtgtgtgccaccatgcctggctaatttttgtattttagtagggacagggtttcaccatgttggttaggctggtctcgaactcctgacctcaagtgatccacctgcctcggcctcccaaagtgctgggatggacttcatttttttaataaggtgaagttcacgtaacatccaattaatcactttaaagtctacagttcagtggcatttagtacactcattgttgtaaaaccactgccaccatctagttccaaaccatcttccaaaaggagaccagacattgattcagcagtcactccctgttcacttcctctccctctctcccctaacacccctgctggccactagtccactctgtctcagtgaatgttactattctagatatttcatataaatagaactaaacaatacatagccatttgtttggcttctctcactatcgtaatatttatggggtttatcca

SEQ ID NO: 45483 - DNA, 1456 bp, Homo sapien
cgtccatttaatggctgataatactccagggcacagagacaccacaatttgtttctccactcattcatttatgcacattttggttgtttctacattttggctattgtgaatggtgctgctatgtacatgtgtgtgtttgaaaagcagtgttcaatcctgttgggcatatatttaatggcagaactgctgagtcatacaataattctatgtttaactttttgaggtattatcaaattggatattagaaatagaagttctgaggcagattctgttgaggagaggagcttcaaaatatcttaagacaataacaatattttacaactattaccctctgtaacaggtagatgattattcaaggcttgagatatctcatttttatctcaataagcccctctatttcctatgcctaccatcagaatgacttcttaataaaagcagtggcttggcatcctcactgcgcaacagagaatgcaagcagagccctcccgaggctccaggtgtgggtgccgtgctagcctcctcacaggcagatggctctgcgtgactcagtgggctcttacctgagagagagttgcatctgcacatgctttcctggcgtcctgggaagcaaggacagtgagaaattagcaacctttcagatacattcaatctcaggtccacacataccaaagtttcaaagagagctttcctaagctgtcaggagcaaaagcagaatgtgaaagaacggcagagtctccttgcatctcaacaccccatggtctactaccatctgtggactgtccaggccacgctgaacagagaaccagtagtacccaaatctgtctaagacctgcagcacaatattcctggggacccacagctgtggccagcaccgaggagaccacactgcaagctggggcagcacccacacacccgggaccctggtgctgcctgtgccctcactgctgcacaggctggcacacacgacttgctctttttacaaagcccatctagggtcaggaaggctgtggcccaaagaaaaggtctattaaaaaaaaaaaaaaaaaaaaaaaagtctaaaaaggaccagatacccagcccaaaaaaacttttcttcagactgcattaactaagtactttgttttcaagagaaacaatcattaattctaaattctatggagggcgcggtctcacgtctgtaatcctagcactttgggaagctgaggcaggaggatctcttgagcccatgagttcaagaccagcctgggcaacaaagtgagaccttgtctctactaaaaataaaaattaaaaatttaaggaaaataggctgggtgtggtggctgacacctataatcccagcactttgggaggccgaggtgggtggatcacctgaggtcaggagttcaagaccagcctggccaacatggtgaaaccccatctctactaaaaatacaaaaaatagctgggtgtggtggcg

SEQ ID NO: 45484 - DNA, 1071 bp, Homo sapien
gctgaggtgggtggatcacctgaggtcaggagttcaagacaagcctggccaacatggtgaaaccccatccctactaaaaacacaaaaattaaccaggcatggtggccggcacctgtaatcgtaactatttggggaggctgaggcaggagaatcgcttgaacctgggaggcagaggttgcagtgagctgagatcacaccactgcactccagcccgggcaacagagcgagactctgtttaaaaaaaaaaaaaaaaaaaaaaaaggaactatactgagattattataaatataccaaatttatacattccaaattcatctttagttaagctctttattggtcattctgcttataattaagacacacacaaaaaaatcgagtatttctatgcaagcagtaacatttggagtaagggggatgaagaatacttagagcagcagaagtctttttgtcaatgaattttactggcaagtactgagtttaatatttgtttttgaaatactattcttgttgatgttacagcctttgattttaaaacatcataagaaaatttaaaatggagaaaataaaacatgagatttaagcaacttcccccggttagtgtccaatgactaaaatgagtttcttaaggtacagtgtaacagactgtggtgatactactgttaaaccgaaggaaaaactactgtaaaaacaacacacagataacttcaattcaatctttattttagccaataaccagcttatttaactgagtgcagcactttgcagaacagacaccttcaacttttaaaactgtaggaagaagtcttttaatggaaacaagctctataactgcttaacaaagaagaaaaagtcttcaagttctttcagattaatttccagtttaatggactcctgtagatacatattatgatgtccacttaaaccagagatgaacatatccaagccactcatcagttgatttctcattctttttggatttgtcaaatgacacagtaacacacttactttggggtttcatcctaaattaaagcctgggccctgctcagcatggagtcgctggacattttggac

SEQ ID NO: 45485 - DNA, 1419 bp, Homo sapien
ccactgcactccagcctggggaacagggcgagactgtctccagaaaaaaaaaaaaaaaaaaaaaaaaatctgatttctataagatgaaatatagtctcaaaagcaggtggtaaagagctgagagtgttctgaacccccccaaaaacccagttagattattattaaataacaacactttgcttttcttttttacttgccaaaaaccatgctgacttaaaatgaacagcagaagcttaagtattaagtcaggcaaaatttgaataccttttggttttatttaaatagatatttcagagaataattttatatcaaactaaatatttcagaacacatttgattaattttggtggaggggacatgttaaacaagtctgatcagagcaaactattaaaaaaatctaagtcttccctattcacctatgtaagatcttttaaatgttaagatttaaaattcttacagtagaggatactttgttttctctttggctgtaaatctcagagaattccattattttttctcaagttcaggaacaagttgcctaaaattatgttggtgtttctctctccaaatcctggtgggctttctaaacatgtaattggccgtttaaaaggaaatacttgacttcatccttgcactggagtcagaaaaataaactgttgttttttattttattttactgtattttgagaaggtgtcactttgtcacctaggctgcagtgcagtggtgcaatcacagcttactatacagcctcaacctcctgggctcaagtgatcctcctgggtagctcagactacaggcgcgcaccaccatacccagcttataaactgttatttaggtatgtactgaatgtcatcagcttcctgtacagcgacactctgaagaacagctaaagcttgacagagcaaacaagagtaagagaaagctcttacatcaaatggacaaaacctaaaaacatactgaagacgtggtttttcctgagaagtctgcctctttttctcttactcttcacatcagcagtttcagaaaggaaacacatacttgcattaaatgtttctctataaaatatttactagaagtactgcttcacaaaagtaggagcagcagaatgaattccatttagacctactgctcctcccttttcagaaagttatgaggcaagagaattgcttgaaagaggttgcagtgagacgagatcgcgccactgcactccagcctgggcacaacagagtgaaactctctctcaaataaaagtttatgaactctgcaatttaacatcctacatcagtcacagactggaatttaatgttttagaattctgtgaaaggtattctttttacagtgcagtttatttacacacggtaaataaatttatcttcaattttttttttatttttcagggtctcactctgacgcccagg

SEQ ID NO: 45486 - DNA, 1277 bp, Homo sapien
cgttagacaatattcctgaaatcaaagtaaaaactaaatcaccttgttaaacaagagacttattttcccaagagaatgtcataaatggaggctgcatttctgaccaagatcttagctgttaatgtatgactgaagatcttggctgttaagtatgactcaagtataacaaagctgaggacacagttgctaatgtctttaatcccttacaattagctctcacatgcaagtacggcttatgcaagcacttcaatttcctacataaattacacagaggatcaattttaccattataacttttgtgtaagtcaaaaggctaatacaatatacatcaaaatctaactgatagcagttattttcttgagattaaaacccatctgtgggaaactatccgatgacctaagaagctcagccgtcagtttccagtctgaactttcctagtgtgcctaaaggaattcgaataacctacagtatagatacttgatgtctacggtccacagaaccagaaaggcctgcaaggcatgccccgtaacacgagcacgcagaccaggcatcctgctgccactgctctctggggaggcaggctgcacagcaacacggtgtcagaaagatttctgaccaaatagttgtttctaaaggcattatttgaaacggatgttttaatcatgaggaaagcttcactaaggaaaaatacctcaggcctccctgcacacatggagcatcaccggaattaggtatggacaaggtcacacctcaagggcagtttattcttaagggataagactggttaattctttccctggttttcacatataaatcctagcgactgtgatttgtggacgttaatgtgttaagcagtaagagtgccaggacaagatgagcagtgtctcagatggaagctgtctggatgccttgtgctttgcattctttctgcatgccctgacactactcacttgtatttcacacatgatcaaattatattatgcacacaattttgcagagttgggggtagttttatttcaccagcaccccgcacgcataatagagaattgttcttagtctgtaaagctactttaatccttccaaaatcaacatgaagaaaacaagttaatgttatgaagtaccccgaattaaactgttttagttaacacacacagtttctgatcatttaaacactaaaaagtaaagctaatttttatagtacgggactaaaaacaacaaactcctgggatctcgggaaagagaaacgcatgttctgagatgcttcaaaaatgatgttc

SEQ ID NO: 45487 - DNA, 1168 bp, Homo sapien
gacaacggatcacctgaggtcaggagtttgagaccagcgtggttaacatggagaaaccccatctctactaaaaatacaaaaattagccaggcgtggtggtgtgtgcctgtaatcccagctactcgggaggctgaggcaggagaatcgcttgaacctgggaggtggaggttgcagtgagccgagatcttgccattgcactccagcctgagcaacaacagcgaaactctgtctcgagaaaaaaagagatgtttcttgtggctggagggtggtgggtgggtgtgtaaaggcccaaattccatcattaggtgggataactcctgaaatcttacatactgcttttaattagatgttcttttcacatattatacaagaacatgtacacaacaatcacccagctgtattgcttgagactagagaaacaaatttaccaaaaatctaagtatctttaaaatgagctcaatataacttagtgacctcacaaaatttcagaagtagtaatgccaaaactcgctaactttcatctttagtcacatgcaaagagaaaaaaaccagacggacttctttttcatagttaatagcagaaattattatagcactctgctgtgccaacatttgagtttcaattcagagactcaaaacctacgtttgtcaattttttttaaaaaggcgtattcctggctgggcatggtgggctataatcccaacactttaggaggtcaagtcgggaggactgcttgaatccagcagtttgcgaccagcctgggcaatatggcaaaacgctgtgtacacacacacatacacacatacacacacacacacacacaatttttgttagcaataaaaataaatttcctggtcaggccctcttcagtccacacatagaagtgataagaaaaatctattgtcaggcatttcaatttttttaaaaaaattacattctctagtctccaggataaagatatattttcttttcttttcttttttgagacggagtttcactcttatcgcccaggctgcagtgcaatgatgcaatctctgctcactgcaacctctgcctcccaggttcaagtgattcttttgcctcagcctcccgagtagctggaattacaggcgtatgctaccacgcttggctagtttttgtatttttagtagagacggggtttcacca

SEQ ID NO: 45488 - DNA, 3567 bp, Homo sapien
cggcctccaagcaccttttataaggggcctggaaatccttaggtttagggaaagactgctgtgtgccatgccatctgcactccagtatataaaaataatctttgtttttacatttactgctgcaaactacaatgaatactatgtgctttcccaacagcaaatgggcggtgggggttagaattctgttcctagaaaaacttccgtgtttttattggcatttgcaggtccagcccacttaagcaggaccaatgatgtctgacagccctggctggaagcagagtgacgcttcatggcaggaaagttggaagccccaggttctaacccagactctatctcttctcaccaggtggcctccagtaggtttcctaacttctctctgcctacatttttttgtctgaaagtggggacagtaatagtccccacagctcatgctatgacaattccattagaatccatgcaagccccttagaaccatgactgacacagtaaatgcttactaaatatgacttgctatgaaagcaggtgtaaaactgttgccctgaaagttttaagtaatgtccagaaaactacctcctgcctcacctgccacactttccatccagtcagtgcagtaggcccttttgcagaaatcaaaaatatatgtagcagtggcaaccagtgtaacagtggagttaatcagatagatgtgatactttgaaatctgtgcatgttgttacatgtacaagtctttatgagaacatctgctttcacttctcttgggcagattcctagcggtggaatggctggatcatactacaggtgtgtgttgaacattccaagaaaatgccaggccaggtgcagtgactcatgactataatctgagcactttccgaggcaaggcaggaggatcacttgagcccaggaattgaagaccagcctgggcaacatactgagaccccgtcttacaagaattaaaaaaagaaaaaaaaaaaaaaaaaaaaagccagacatggtagtgcgtgcctatagtcccaactacttaggaagctgaggccagaggatcacttgagcccaggaggtcatggatgcagtcagctatgatcacaccattgtactccagtctaagagacagagtgagaccctatttcaaaaaaacaaaaaacaaactcaaaaaacaaaaaaaaccaactcttttcaaaatggttatgctgggtcacattcccaacatcctataagcaatgtggagagtcccggctcctcacgcccaacaacgctgggtgggtgtcacagccattctaatgggggcgtgggctgtagtctccatctgcatctcgctgactgctgagcttctgaggcactcaattgctgtctatacagtttctggtaaagtgtctgttcaagtcacttgcctcttttttattgggttacctgttttcttaatattgcttttttttttttttttttttttgacacagggtctcgctctgttgtccaggctggagtacagtggtgtgatcgtgactcactgcagcctcaacatcccgggctcaagtgattctcccacctcagcctcccaagtagctggtactacagacacacaacacgatgcctggctaaattttttttttggagacagtctcgctttatcacccaggctggagtgcagttgcacaacctggactcactgcaacctccacctcccaggttcaagtgattcttgtgtctcagtctcccaaatggccgggattataggcataagccactacacctagctaatttttgtatttttagtagagatggggtttccccatgttggccaggttgttctcgaactcccaacctcaggtgatccgcctgcctgggcctcccaaagtgctgggattacaggtgtgagccaccgtgcccgactgctaacttttttttttttttttttttgaagagacaggggtctcactttattgcccaggatggtatcgaacaactggcttcaagcaatcctcctcccaaagtgctgggattacaggtgttagccatagtacctagccaaaattgagttttgagagttcttacctattctggatacaagtcatctaaaagacatttgctaatattttctgccagactatggtttgtctttcgttctctgttttttctaaggagcagaagttttaaattttgaacaaattcaatttataaatgttttcttttacgcattctatctttgatctcacatctaaaaactgtttgcttaattcaaaatctcattttttctaattttacgttttatatttaggtatatgatccattgagttaatttttttttttttttttgagacggagtctcactctgtcacccaggctggagtgcagtagcgtgatcttggctcactgcaagctccgcctcctgggttcatgccattctcctgccttggcctcctgagtagctgggacttcaggtgcccatcaccacgcctggctaattttttgtattttcagtagagacggggtttcatcgtgttagccaggatggtctcgatctcttgacctcgtgatccaccctccttggcctcccaaagtgctgggattacaggcgtgagccaccatgcctggcctttttgtttttgtttttgtttttttgacacggagtctcactctgtcaccaggctggagcacaacggtgcaatctcagctcactgcaacctctgcctcctgggttcaagcgattcccctgcctcaacctcctgagtagctggactacaggggcgtgccaccacacgtggctaaatcttttcctttgtattttcgtagagacggggtttcaccatgttggccaggatggtctcgatctccagacctgatgatctgcccaccttggcctcccaaaatgctgggattacaggtgagccaccttgcctggcctgagttaatttctgtacatgatgtcaagttctccttttgcgtaagaatatccaattgactaaccaggcgtggtggctcacgcctgtaatcccacagctttgggaggccaaggcgggtggatcacctgaggtcaggagttcgagaccagcctgaccaacatggtgaaaccccgtctctactaaaaatacaaaaattagctgggtgtggtggtgagcgcctgtaatcccagctaattgggaggctgagacaggagaatggcttgaacctgggagggggaggttgcagagagctgagattgcaccactgcacttcggcctgggcaacagagcaagactctgtctcaaaagaaaaaaaagaatatccaattgttccagcccctaattgctattcaatttaattttgctttttaatttaaaattatttcaaacttcaaagagttgcaagaataatacaaagaaaccatgtaccctcctcacccagactcactcactacgaacatggcttcattattcccactttattcaaacaaaaaggtttttgttttgttttgttttcctgaatcatgttcaccttacttttttttcttttctttttttttttttgagacggagtctcgctctgtcccacaggctggagtgcagtggtatgatcttggctcactgcaagctc

SEQ ID NO: 45489 - DNA, 1133 bp, Homo sapien
cggctaattttttgtatttttagtagagacagggtttcaccgtgttagccaggatggtctcgatctcctgacctcgtgatccacccaacctgacctcccaaagtgctgggattacaggcatcagccaccgcacccggccatatattggtatttcaactaagatctgatttgaaaaaagggctctcctgctttctaacgaaaaaaactagcgatgtaccactctgattcagaaggtaaatcctcatcactgggaccctaaaccttcttgctcaacactaaatggaagctttttttgaggatcaaattgttttgaaaaccaactttggcttaaaagagatagaaaaaaactgtaacaaaaaccagggtattgaccaggcatgctggcgtatgtctatagcctcagctactcaggatgctgaggtgagagaaccccttgaccccaggagttagaatccagtctgagcaacatggcaaaacactgtctctttaaaaaaccaacccaccagctatttataaaaacaaactctgaagaaatttatatattgtctttctaaaactgatgaggatcaaatatatcaaaattaccttaattcagaagggcttctggtctggtctccaatacatgtaaatttgtctgaaacaaacagaaaaggctgtatttgtattgcactcaggttgtgaataaaatattctattttgctagtagctatattttatgcaacgacacataaatttgacccttccctattactatttctcccccaaaattgctttatttagcagtactgtcatattttgtttttcagcatgggaacaaaataagaaatcagatctcaacttctttaagaatccttagaaatgccccagggaaaataccttgaattaaactgaaaagtatgggcacagaggttagaatcctatcactagaaaaattacagtaacaatttaaaaactaatgcaggccgggcccagtggctaacccctgcaatcccagcactttgggaagctgaggcaggcaaatcacctgaggtcaggaattggagaccagcatggtcaacatggtgaaaccccatctccactaaaaatacaaaaaaaaaaagttagccaggcatggtgtcacaagcctgtaatcc

SEQ ID NO: 45490 - DNA, 1716 bp, Homo sapien
cgctgcactccagcctgggtgacagtgcgagactctgtctcaaaacacacacgcacacacacacacagacacaacactaatacaattcaacaaattctgaagattaatttaatccagactttgcctgtttggcatgacagtggagagcatttcatctgaatctcaaggaagccactaaataactactttgtgagtcctggcaagtctatgttgggacacttccaatccctccctctgtccctctcctgctgacacggtcccatccagtgcctggccctggtgcccaggaaggtggcttgaatggtgacagagatcacaagagaggtttctgactcctcttgacatacttctggtggaatgaaaatatgtccaattctagatttcttctgatttcagaacatttattgtattttttttatttttgagacagcagtctcgctctgtcaccaggctggagtgcagtggtatcatctcagttcactggaacctccgactcactggttcgagtgattctcctgcctcagcctcttgagtagctgcgattataggcacatgccaccactcccagccaatttttatatttttagtagagacgggttttcaccatattggtcagtatggtctcgatctcctgacctcgtgatctgcccacctcggcctcccaaagtgctgggattacaggcgtgagccactgcacatggccacatttattaattttttgagacagattctcactctgtcaccctggctggagtgcagtggcatgatcttggctcactgcaacctctgcatcccaggttccagcgattttcctgcctcagcctcctgagtagctgggattacaggcacacgccatgccttttattatttattagtagagatggggtttcactatgttggccaggctggtctcaaactcctgacctcaggtaatccgcctgtttcagcctccgaaagtgttgggattacaggcctgagccactgagcctggcctgatttcagaacatttaaagatgcttctgtaatcgctccctcaaattaaactatgtgaaaagaccacttgtggaggcttcacaggtcaccacctgcctattaattcagtgtcttgtgagtctgcaaactcacatgcacacatctagtctggagtcagtagatgaatcaacaaactgaaatatctcccagttgaactgtgaattctaattcatttacttaaagtagtttcgttttgcaattatgctgcttatgtacaagcaagcacgtacttttccggcagtaaaaatgagtgtggaaggaaaacagtttggcagttcctcaaaaaattaaacacagaattaccccataacccagcaattctactcctaggtatattcccaaaagaactgaaagcagggattcaatgcatgtacacattatgttcttagcagcagtactcagcagccagaaggtggagacagcccaaatacccactgagcatgaatggatgaataaaatgtggtctatccaaacaattgaatattattcagctataaagataaaggaggccgagcgtggtggctcacgcctgtaatcccagcactttgggaaggtgaggcgggtggatcacctgaggtcaggagttcaagaccaacctggccacctcgtctctattaaaaatacaaaaattgccaggcacggtggctcacgcctgtaatcccagcactctgggaggccaaggcg

SEQ ID NO: 45491 - DNA, 1135 bp, Homo sapien
ggcgtctgtagtcccagctactctggaggctgaggcaggagaatgccatgaacccaggaggtagggcttgcagtgagccaaggttgcacccctgcactccagcctgggcggggtgacagagtgagactccatctcaaaaaaaaaaaaaaaagaagtcctggtcctgtctctgctagaacacagacaaacctcacaaatatgctaagtgacagatgccatacacaaaaagccacatatatacaaccccatttacatgaaatatccggaacacacaaatccaaagagacagaatgcagtggttgccaggggctgcatgtgtctgcgtgtgcatgcacatgtgtgtgcagtggacaattatttaatgggtacagggtttccttttgaggtgatgaaaatgtcatggaattagctagagacggtggttgcaacacattgtaaatgtactaaacggcaccgaatcattcactttaaaatggtttatgttatgtgaatttcacctcagaaaaaaagttgggtgtgaaaaggcacacaggagtaaacagtgaatgatgcaaactaccccagacttcaggaagcgaagcctcgctccggggcagggtcctatgagcatacccgaaaagtgccaccaaatcaagtttcaaagcatgggtctcaacctcagcacaatgaacattttaggcaggggtgtgtgtgtgtccccaggaggatatctggcagcatgccagtagtgctcctttccccagctgtaacagccacctggcatcccgagaggcaatactgaccccagttgagaactcttcaactgtcacaattatctcaaccactaaatataaatcttttcaagtactttccagatcaagggacaggtaggaagagaaatactactaaaaaaaattatacataatctgctctattttatcattattaattatttttttgagacagggtcaccctctgtcagccagtctggagtacagtggcacaatcatggctcactgcagcttcgacttcctgggctaaggtgatcctcctgcctcagcctcctgagtagctgggaccacaggtgtgtgccaccatgcccagctaattaaaaaatatatatatatttgtagacatggggtcttgccatactgcg

SEQ ID NO: 45492 - DNA, 1040 bp, Homo sapien
agattgcgtcactgcactccagcctgggtgacagagcaagactccatctcaaaaaaaaattaaaataaaataaaaataaatttaaaaaataaaaaaattagccgggcacggtggcatgcacctgtagtcccagctacttgagaggctgaggcaggacaatcaattgatcctgagacagggaggttgcagtgagccaagattgcatcactgcactccagcctcgatggcagagtgagactccgtctccaaaaaaaaaaaaaagaaaaagatgggcactttttcaaggctcttgataaaatcaactgactctatacagctaatttagcaatattaaatattaatatgacttctttgcacatatcctagtacttatacttttatttcagcatttttcaaaatctagaaactgaatccttgagacatacctagagaatttctctacaagctgcattaatatttctaatcaagtacaggtatacttgtgggggatgatttcttctctatcaacataatcctaagatgggaaacacataagtgcaccactggttatctacaattctgagatacccaaaccagaataggacacacggcattaggcagactttctcacattcagggtgagcagtcttatgtttactacaaactttggggtatctgattaaagccttgccgtaagtgtggtgcacatgtaacatactcactgcatctttctcaaccctgaaaaagtctatattccggaaaacatccagccccaagagttttgcctaaaggcctgggggcttgtaagaaacaaagtaaactcccttccaaataattctttaattcaaaaacacactgaacaactagaatgtgaaataatactgaacttaatgacaactctgtatcataatcttcaactatatatgatcatactaataaacaggataaaaacaaactagaaatgccttctttcaaacaaaaattagagttcagtatcaataaaaagataacaatacctgtaaaacacaaccaaccaaccaaaaaaaggtctaaagacatca

SEQ ID NO: 45493 - DNA, 1520 bp, Homo sapien
cgtggtgaaactccatctctgctaaaaacaaaaaaattagccaggcgtggtggctggcacctgtaatcccagctactcgggaggctgaggcagaaggatcgcttgaacccaggagacggaggttgcagtgagcagagatcatgccactgcactccaggctgtgagacaaagtgagactccatctcaaaatcaatcaatcaatcaatcagagtctcactgtcacccaagtgggtgacagccttgaacagctcactgaaaccttgaactcctaggcacagccatcctcttgcctcagccccctaagtagcaaggattcaggcatgtgccacactgcacgtgactaaattttttgtttctttatggagagagggtctcactatgtggcccaggctggtcttcaactcctggtctcaagcaatcctcctcccttggcctcccaaagtgctcagattataggaatgagccactggttctagctgaaagtgaaggacttaaagctagagaatttaatgccagcaaaagggtggcttgatcagtttagaaagagggttggcttaaaaaatgttaagataacaggagaagcagtttctgccaaccaagaggcaccagggttcccagatgccatgaagaaaatcattgaggaaaagaaaatcttcctgaataggtttttaatgcagacaaaagtgccctattctggaaaaaactgccacaaaggacacttattagtaaggaagaaaagtgagccccagcactgaaggcaggcagggagaggccaactctactgctttgtgcaaatgcagccgggtttatgatcaggactgctcttatctacaaagctgctaacccctgagccttgaaggggaagagataaacaccagttgccagtctcttggttgtggaacaagactgggacaacaaaatccctttttctggactggttccatcgatgttctttgtctgcagtcaggaagtacactttgccagtaagggattgccttttaaagttctttagatattggacaaggcccctggccactcagaaccccatgagttcaatactgacggcaatgaagtggtctacttacccccaaacacagcacctctccttcagcctctagattagggggtcataaggacctttaaggctcataacacacagtactctatggaaagaattgtcaatgctatggaagagaatcccaatagacagaacattgtttaagtctggaaggattatcctgctgaagatgccaaggttgttacagaaaaagctgtgaaggccatgagcctgaaacaatcaactcctgctggagaggacgacgtccagatgctgcgcctgacctcacaggatttacgagagccagacgaggaaatcatgaaaagactgtgcatatgcttttaaaagggtaggggggtgggtaaggacttcaacatgtggatcttagagaaattcaagagctattagacaccacaccagaggaattaacagaacacaccttgacagatgtcagtacttccaa

SEQ ID NO: 45494 - DNA, 1742 bp, Homo sapien
gaggctgcagtgagccaagactgagccattgcactccagcccaggcaaaaaaaaaaaaaaaaagaaaaagaaaaaataaaacgaaaaagaaagaagtcagaaattatgtatttcagtaaagttccaccaagtatgcctgtctctcctacctccccttccaccacctccatccaagacagcaagaccaatcccatctctttctcctcctcagcctcaacctgaaaatgagaaggaagacctttatgagggatccacttccactcattaaatagtaaatacatttttctctcccttatgattttcttaatattttctctagcttgatcacaaaaatatataatatataaaacataaaaactgtcttttgactgctatcggtaaggcttccagtcaatagcaggctattagtagttcatgttttgggagtcaagtgatagaagaattttgactgcacagcaggttagcactcctaatccctgtgttaagggtcacgatattccttccctttcactctttgtaacacaactgtctagcattttacttctacatgttttttgaagactccttctgggtctttgttcccagttcctcagaaggagcttcaaaaactattggatgttccggagtgataggcatgtctttgttattcatgagcctccatgtttttgctgagatgagctgactcaagatagaggctggtcaccagaaagacaaaccatgacattagacggttggggtttgaaaccattctgactggggtgggagaggggctagagattgtgctctatcaattgtgcccaagtaacaaagccccaataaaaactctcaacaccaaggctcaggggagcttcctggttagaagctcattgaccccgatttgtcaggagagactccatggggagagggcttggaggatgtgtgcttgagactctgctaggccttgctgtatatatctcttcatttgcctggtctgatttatattaaactagatatagcaccagaagataactgcagtgtgatgggatacacttctgcctgaagaacttcctccatctcacagggcagatctactggcaacaaaccccacaacttttgtctgaggaagtcttttgtgggactaggtctcattctatcacccaggctacagtgcagtggcacaatcttggctcactgcagcctcaacctcccaggctcaagcgatcctcccacttcagtctcctgagtagctgagaccacaggcaccgccagagcacctggataattttttttttgtagagatgaagtctcgctatgttgcccaggctgctctcaaactcctgggctcaagtgagtctgccactcagtctcccaaagtgctgggattacaggtatgacccaccatgcctggcctgtatgaaatactttttttctggctacattcaaaactttctctttgactttcagcagtttgactataatgtgcctaggtgttgagggttttttgtttatatttatggtgcttggagtcctctgaacttcacagacctctggtttgttgtcttttactaatgaaaaaattctcaaccattagctctttgaatatttcttctgccccgttttcttcctagggctccaattatctgtatatttgacagtttgctatagtctcacaactactcaacactttttttttgtttgagatggagtctcgctctgtacataggctgaagtacaatggcacaatctcagctcactgcaatctc

SEQ ID NO: 45495 - DNA, 1658 bp, Homo sapien
cggcctcaaaatattttttaaaaaaattggcatggtggtgcatacctgtagtcctagctactccagaggctaagacaggaggactggttgagcccaggagttgaaggcagcagcgagccactgtatgtcagcctgggcaacagtgagactctgtctcttaagaaaaaaaaaaaaaagtgaatgtcttgtgtgccttgctatgcacacaggttctcagcccctgagtggagtgcaacttacgggcctaccctacactcaggagccagcaacagcccctcatcctgctctcaccaacccagctccacatctgccacacccagtcacgcccccttctgaaccctcaactggttcttttgtggttcttctctcaagtcgaggatccactccttattccctttccctgaatgtaccccagttcctagaaagctctacgcactgcagcgctctgagggttcaatcctttcagattccaccagtgtaaagcaagcctcagcacccctttcctttccaaacctgctggcagtccctcccagctctcctgcagcacagactcaagcctcccttccatccctttcccctcctgcccctgtgctccactcccactgcttcagcctcttgatggcttaccatctttgcctggcccgttactaatctgtgtctctatcccacctcttttccacttcaatccatcttaacagcactgcctgatttatctttctgaaggacagctctgacatgcgactcctccgctcagaagtcttcaaatactcctcctacggaaaaaatcaaactttttagcctggcctaatttaaagctcttactgactgtattcccaggtactcctccccagggagtcaagtaagcctagaaagggccaaacacatgggcacgaacaccccagacaactttggtggtctctgccgaactctgaccactagtctcttaaagagaaatcctagaaacatgaacatatttttgcctcaaagaatgagagccaatttttaaaggtaaaatatctccccaccaagcaagaaaaaagacatgcttccaaaacttagcttatttcctgcaaaacccacaaaatatagaaagtaccctgagttggaaatgtttttataacccatattctaaatcatctgtgatttagaaagagaactggaaacaggaataatagaaactatgtcttcaggctatttagaatgacacagtgctctataaacctcagctaatgtctaggtttgttaggcggtcactgtgagaaaagcattttgtgagcctactctggtgccaggcaccagtttaggtcagagtaaagtaagcacaaatatttacttgggagtctgagtacatatatagtcatattatataacaacatgaaaataggatagaagtgtcaattgttgataaaacatttaacaataaagtggcctcaatatctgggttcgtatttgtatggcttcattcactcactcaacaacgacctgcccatctccaatcatgtgccaggcaccacagctcaggggagtccgtaggaaacaagacacagcacttgctgttctagaacttgcttgttggtcgaggaaggcattaagcgaacagtgcaagtctttattttgatacatcaactgctatccattgctaaggaaacataaaacta

SEQ ID NO: 45496 - DNA, 2365 bp, Homo sapien
cctggcctagaatttcttaatgttcctctctccccctccacaatcccacctaatgtagcaattaacagtttggtgatatgttgggacaaccaagaatgtaatttctgaaaacagttgatatttcatttaaaacaaaaaatattattaattcagaaggcccaagaaaaaggctcttgtactgttcactcttctgagggaagtatcctacaaaacagtaataccgtaaagacattcaggagagcccaggtatatggagagcatactctgattttaatcacttcaggtattttcaccaggtaattaaattcactgtccaatcacctgtctcaaaatcctgctgattaatgagaagccttaatgggaaatttggtattaactacatcttttaggaaatcattaattctagaaatggaaaattaaaactactcctgacttcactttacccccacttcaaaagtctacccagtctagccaaggttctcactgggaagtggggagaggaggaatatgagaggtcccaaggaaactaaactggaaacgagaaagtggaaagaggaaccaagaacccagtctcggatggctcttggggctggctggctcctctctctctccttccagtgtgctttctctgctcctctgtgaatctctctattaaccaatcactgtcatcttgtacagggttcaacgcagcctaggattctaaatcacagcaatcatcaaatgtcagccatgtctctgtctccagagtctcctctgcaccaactcactccctcactgtctgcaggccaggtggctggtacactgtggaactggggaggatacagcaagtcctgtgggcagctgcccttgccaaagggacaatgggtggagtacctgagaagggaacatgggtaggccaagcaatgacgatatctttaacatgggaacaaacttctctacatgtgcacttatagcagtacccccatatctgagaaggacatgctccaagacccccaggggatgccagataaactgtggatagtaccacactttatatagactacattttttcctttatgctgtattttttcctatacaaatgataggaacttaatcctgtaacaaagttttatttataaattaggcacagtaagaaattaacaataataactaataatcaagcagaaccaccataacaacataccgtaataaaagttatgggaatgtggtctctctcgtactgtaccgtgatattttatggtgccatacctcaaaagacaaggccacgggtacaggggctactgcaattcttccctctggcactgcactagctgaggacatgccacaaagcagcacacatggatccataatggagaatccagaacaattacagtccccaaaacacacaaaataaaaacacaactgcacagtcactggtgttttttcttttctttaaaagcattcatgaatatccccactgccttatctgcctactatgtcaaaaacaggagagaaggccatggccagaatcatggaacatccaataaaggcagtcacttgttattctgacaagtcatttgttttcagttcatctgtcgcatctgtcaagaaaaacacagactgtcttctaaaagtccgtttttaactattttattttttttcaatgacaaattccacttgtaccatagaagccatattctgcatgttggagaggcccctttgtggtccctcatccctgggttcttcctgggcatcctatggcctcccctctggtgacaggcagcaccccgaagacttaattttgattcttaaaaagggacagatccctccttccacccttgtccaggtacttccagagggtgggtccccttctcatgggaacatactacccccactcaccagaccacagtgatgagtccagcccagactgtgggccatgaaagcctaagctcccaaaacaaacaagatgccagggacactgcagccatctcagaggacaccgaaagacattttaaagccaagggaagcacagcagaacatcagctgctggacaccaagggagccacagctcgagggggttcgtgctccaacagcagatggagctacacccttcccgatgacgtcacatcctaataaagccctgtttgcagtggctgctgtgataaaaaagcaagctctgcatgaaatcaacatggaacaggaaacaaggggtggggtgggacggagtccaatctgattctgaagtttgagaagctgtacaacccattagtaattgtggctatttaaaaataaaatacagtttccttcaatttatgggtatttattttcttttttttttttttggaggcagagtttcacttgttgcccaggctggaatgcaatagcg
